United States Patent Application Publication US 2016/0040215 A1 - sequence listing, part 2

SEQ ID NO: 1734 - DNA, 1476 bp, Slackia faecicanis
gatgaacgctggcggcgtgcctaacacatgcaagtcgaacggttaaggcgccttcgggcgcgaatagagtggcgaacgggtgagtaacgcgtggccaacctgccccctcctccgggacaacctcgggaaaccgaggctaataccggatgctccgggccccccgcatggggggcccgggaaagcccaggcgggaggggatggggccgcgtcccatcaggtagtaggcggggtgacggcccacctagctgacgacgggtagccggactgagaggtcgatcggccacattgggactgagacacggcccagactcctacgggaggcagcagtggggaattttgcgcaatgggggaaaccctgacgcagcaacgccgcgtgcgggacgaaggccttcgggtcgtaaaccgctttcggcagggaagaattttgacggtacctgcagaagaagccccggctaactacgtgccagcagccgcggtaatacgtagggggcgagcgttatccggattcattgggcgtaaagcgcgcgtaggcgtctcctcaagcggcaccgtcgaagccgggggctcaacccccggaagcgggccgaactggggggatcgagtgcggtaggggcaggcggaattcccggtgtagcggtgaaatgcgcagatatcgggaagaacaccgacggcgaaggcagcctgctgggccggcactgacgctgaggcgcgaaagctgggggagcgaacaggattagataccctggtagtcccagccgtaaacgatgggcgctaggtgtgggggagccattcctccgtgccgcagccaacgcattaagcgccccgcctggggagtacggccgcaaggctaaaactcaaaggaattgacgggggcccgcacaagcagcggagcatgtggcttaattcgaagcaacgcgaagaaccttaccagggcttgacatcaccgtgagccggcggagacgccggggccgaaaggagcggtgacaggtggtgcatggctgtcgtcagctcgtgtcgtgagatgttgggttaagtcccgcaacgagcgcaacccccgccgtatgttgccatcgggtaatgccgggcactcgtacgggaccgccggagccaatccggaggaaggcggggacgacgtcaagtcatcatgcccctcatgccctgggctgcacacgtgctacaatggccggtacaacgggccgccacgccgcgaggcggagcgaatccctcaaagccggccccagttcggatcgcaggctgcaacccgcctgcgtgaagccggagttgctagtaatcgcggatcagcatgccgcggtgaatacgttcccgggccttgtacacaccgcccgtcacaccacccgagtcgtctgcacccgaagccgccggccgaacccgaaaggggcggaggcgtcgaaggtgtggagggtgaggggggtgaagtcgtaacaaggtagccgtaccggaaggtgcggctggatc

SEQ ID NO: 1735 - DNA, 1505 bp, Slackia heliotrinireducens
agagtttgatcctggctcaggatgaacgctggcggcgcgcctaacacatgcaagtcgaacgattaaaccgccctcgggcggacatacagtggcgaacgggtgagtaacacgtgaccaacccgccccctcctccgggacaacctcgggaaaccgtggctaataccggatactccggcagcagcgcatgctgcggccgggaaagcccagacgggaggggatggggtcgcggcccatcaggtagacggcggggcaacggcccgccgtgccgacgacgggtagccgggctgagaggctgatcggccacattgggactgagacacggcccagactcctacgggaggcagcagtggggaatcttgcgcaatggggggaaccctgacgcagcgacgccgcgtgcgggacgaaggccttcgggtcgtaaaccgctttcagcagggaagaaacatgacggtacctgcagaagaagctccggctaactacgtgccagcagccgcggtaatacgtagggagcgagcgttatccggattcattgggcgtaaagcgcgcgcaggcggccggccaagcgggcctcgtcgaagccgtgggctcaacccgcggaagcgacccgaactggccggctcgagtgaggtaggggaggatggaattcccggtgtagcggtggaatgcgcagatatcgggaggaacaccgacggcgaaggcagtcctctgggccttcactgacgctgaggcgcgaaagctgggggagcgaacaggattagataccctggtagtcccagccgtaaacgatgggcgctaggtgtggggggccggaccccccgtgccgcagccaacgcattaagcgccccgcctggggagtacggccgcaaggctaaaactcaaaggaattgacgggggcccgcacaagcagcggagcatgtggcttaattcgaagcaacgcgaagaaccttaccagggcttgacatgcaggtgaagcggcggaaacgccgtggcctgaccggagcctgcacaggtggtgcatggctgtcgtcagctcgtgtcgtgagatgttgggttaagtcccgcaacgagcgcaacccctgccgcatgttgccagcatcaagttggggactcatgcgggaccgccggcgccaagccggaggaaggcggggacgacgtcaagtcatcatgcccctcatgccctgggctgcacacgtgctacaatggccggcacagcgggctgcgacgcagcgatgcggagcgaatccctcaaagccggccccagttcggatcggaggctgcaacccgcctccgtgaagccggagttgctagtaatcgcggatcagcacgccgcggtgaatgcgttcccgggccttgtacacaccgcccgtcacaccacccgagtcgtctgcacccgaagccgccggccgaacccgttaaggggcggaggcgtcgaaggtgtggagggtgaggggggtgaagtcgtaacaaggtagccgtacgggaacgtgcggctggatcacctcctt

SEQ ID NO: 1736 - DNA, 1473 bp, Slackia isoflavoniconvertens
agagtttgatcctggctcaggatgaacgctggcggcgcgcctaacacatgcaagtcgaacgagtaagacgccttcgggcgtggatagagtggcgaacgggtgagtaacacgtgaccaacctgccccctcctccgggacaacctcgggaaaccgaggctaataccggatactccgggcaccccgcatgggatgcccgggaaagccctggcgggaggggatggggtcgcggcccatcaggtagacggcggggtaacggcccaccgtgcccgcaacgggtagccgggctgagaggccgatcggccacattgggactgagacacggcccagactcctacgggaggcagcagtggggaattttgcgcaatgggggcaaccctgacgcagcgacgccgcgtgcgggacgaagtcattcgtgacgtaaaccgctttcagcgaggaagaaccatgacggtactcgcagaagaagccccggctaactacgtgccagcagccgcggtaatacgtagggggcgagcgttatccggaatcattgggcgtaaagcgcgcgcaggcgggctttcaagcggcggcgtcgaagccgggggctcaacccccggaagcgccccgaactggaagcctcggatgcggcagggggaggcggaattcccggtgtagcggtgaaatgcgcagatatcgggaagaacaccgacggcgaaggcagcctcctgggccggcatcgacgctgaggcgcgaaagctgggggagcgaacaggattagataccctggtagtcccagccgtaaacgatggacgctaggtgtgggggaggaatctcctccgtgccgaagccaacgcattaagcgtcccgcctggggagtacggccgcaaggctaaaactcaaaggaattgacgggggcccgcacaagcagcggagcatgtggcttaattcgaagcaacgcgaagaaccttaccagggcttgacatatcggtgaagccggagagatccggtggccgagaggagcccacacaggtggtgcatggctgtcgtcagctcgtgccgtgaggtgttgggttaagtcccgcaacgagcgcaacccccgccgcgtgttgccagcattcagttgggcactcacgcgggactgccggcgtcaagccggaggaaggcggggacgacgtcaagtcatcatgcccctcatgccctgggccgcacacgtgctacaatggccggcacaacgggttgccaccccgcgagggggagcggatccctaaagccggccccagttcggatcgcaggctgcaacccgcctgcgtgaagccggagttgctagtaatcgcggatcagcacgccgcggtgaatacgttcccgggccttgtacacaccgcccgtcacaccacccgagtcgtctgcacccgaagccgccggccgaacccctccggggggcggaggcgtcgaaggtgtggagggtgaggggggtgaagtcgtaacaaggtaacc

SEQ ID NO: 1737 - DNA, 1463 bp, Slackia piriformis
gatgaacgctggcggcgtgcctaacacatgcaagtcgaacggttaaggcgccttcgggcgcgcatagagtggcgaacgggtgagtaacacgtgaccaacctgccccctcctccgggacaacctcgggaaaccgaggctaataccggatggtcccgccgggccgcatggccgggcggggaaagcccaggcgggaggggatggggtcgcggcccatcaggtagtaggcggggtgacggcccacctagctgacgacgggtagccgcgctgagaggcggaccggccacattgggactgagacacggcccagactcctacgggaggcagcagtggggaattttgcgcaatgggggaaaccctgacgcagcaacgccgcgtgcgggacgaaggccttcgggtcgtaaaccgctttcagcagggaagaagaatgacggtacctgcagaagaagccccggctaactacgtgccagcagccgcggtaatacgtagggggcgagcgttatccggattcattgggcgtaaagcgcgcgtaggcgtcccttcaagcggcaccgtcgaagccgggggctcaacccccggaagcgggccgaactggggggatcgagtgcggtaggggaaggcggaattcccggtgtagcggtgaaatgcgcagatatcgggaagaacaccgacggcgaaggcagccttctgggccgccactgacgctgaggcgcgaaagctgggggagcgaacaggattagataccctggtagtcccagccgtaaacgatgggcgctaggtgtggggggagatgtccctccgtgccgcagccaacgcattaagcgccccgcctggggagtacggccgcaaggctaaaactcaaaggaattgacgggggcccgcacaagcagcggagcatgtggcttaattcgaagcaacgcgaagaaccttaccagggcttgacatcaccgtgagccgccggagacggcggggccgaaaggagcggtgacaggtggtgcatggctgtcgtcagctcgtgtcgtgagatgttgggttaagtcccgcaacgagcgcaacccccgccgcgtgttgccagcattgagttgggcactcgcgcgggactgccggcgtcaagccggaggaaggtggggacgacgtcaagtcatcatgcccctcatgccctgggctgcacacgtgctacaatggccggtacagcgggctgcgacgccgcgaggcggagcgaatcccacaaagccggccccagttcggaccgcaggctgcaacccgcctgcgcgaagccggagttgctagtaatcgcggatcagcatgccgcggtgaatacgttcccgggccttgtacacaccgcccgtcacaccacccgagtcgtctgcacccgaagccgccggccgaacccgcaaggggcggaggcgtcgaaggtgtggagggtgaggggggtgaagtcgtaacaaggtagccgtaccggaagg

SEQ ID NO: 1738 - DNA, 1355 bp, Slackia sp.
  NATTS
tttgatcatggctcaggatgaacgctggcggcgcgcctaacacatgcaagtcgaacgagtggcgaacgggtgagtaacacgtgaccaacctgccccctcctccgggacaacctcgggaaaccgaggctaataccggatactgaaaggcgggaggggatggggtcgcggcccatcaggtagacggcggggtaacggcccaccgtgcctgcaacgggtagccgggctgagaggccgatcggccacattgggactgagacacggcccagactcctacgggaggcagcagtggggaattttgcgcaatgggggcaaccctgacgcagcgacgccgcgtgcgggacgaagtcattcgtgacgtaaaccgctttcagcgaggaagatgacggtactcgcagaagaagccccggctaactacgtgccagcagccgcggtaatacgtagggggcgagcgttatccggaatcattgggcgtaaagcgcgcgcaggcgggctttcaagcggggcgtcgaagccgggggctcaacccccggaagcgccccgaactggaagcctcggatgcggcagggggaggcggaattcccggtgtagcggtgaaatgcgcagatatcgggaagaacaccgacggcgaaggcagcctcctgggccgatcgacgctgaggcgcgaaagctgggggagcgaacaggattagataccctggtagtcccagccgtaaacgatggacgctaggtgtgggggcctccgtgccgaagccaacgcattaagcgtcccgcctggggagtacggccgcaaggctaaaactcaaaggaattgacgggggcccgcacaagcagcggagcatgtggcttaattcgaagcaacgcgaagaaccttaccagggcttgacatatacaggtggtgcatggctgtcgtcagctcgtgccgtgaggtgttgggttaagtcccgcaacgagcgcaacccccgccgcgtgttgccagcatgggcactcacgcgggactgccggcgtcaagccggaggaaggcggggacgacgtcaagtcatcatgcccctcatgccctgggccgcacacgtgctacaatggccggcaacgggttgccaccccgcgagggggagcggatccctccggccccagttcggacgcaggctgcaacccgcctgcggaagccggagttgctagtaatcgcggatcagcacgccgcggtgaatacgttcccgggccttgtacacaccgcccgtcacaccacccgagtcgtctgcacccgaagccgccgccgacggaggcgtcgaaggtgtggagggtgaggggggtgaagtcgtaacaaggtagccgtaccggaaggtgcggctggatcacct

SEQ ID NO: 1739 - DNA, 1528 bp, Solobacterium moorei
tcaaatgaagagtttgatcctggctcaggatgaacgctggcggcgtgcctaatacatgcaagtcgaacgctggagatctagcttgctagatcgaaggagtggcgaacgggtgagtaatacataagcaacctacccacgaagactgggataatctctggaaacggggactaataccggataggtaatcggaaggcatcttctggttattaaaggttaaaaacactggtggatgggcttatggcgcattagttagttggtgaggtaacggcccaccaagacgatgatgcgtagccggcctgagagggtgaacggccacattgggactgagacacggcccagactcctacgggaggcagcagtagggaattttcggcaatgggggcaaccctgaccgagcaacgccgcgtgagtgaagacggccttcgggttgtaaagctctgttgtaagggaagaacggtagatagagaatatctaagtgacggtaccttaccagaaagccacggctaactacgtgccagcagccgcggtaatacgtaggtggcgagcgttatccggaattattgggcgtaaagggtgcgtaggcggcctgttaagtaagtggttaaattgttgggctcaacccaatccagccacttaaactggcaggctagagtattggagaggcaagtggaattccatgtgtagcggtaaaatgcgtagatatatggaggaacaccagtggcgaaggcggcttgctagccaaagactgacgctcatgcacgaaagcgtggggagcaaataggattagataccctagtagtccacgccgtaaacgatgaatactaagtattggggaaactcagtgctgcagctaacgcaataagtattccgcctgtggagtatgcacgcaagtgtgaaacataaaggaattgacgggggcccgcacaagcggtggagtatgtggtttaattcgacgcaacgcgaagaaccttaccaggccttgacatcccttgcaaagctgtagagatacagtagaggttatcaaggagacaggtggtgcatggttgtcgtcagctcgtgtcgtgagatgttgggttaagtcccgcaacgagcgcaacccttgccttcagttaccagcattcagttggggactctggagggactgccggtgataaaccggaggaaggtggggatgacgtcaaatcatcatgccccttatggcctgggctacacacgtactacaatggctgttacaacgtgcagcgacctagcgataggaagcgaatcactaaaagacagtctcagttcggattgaagtctgcaactcgacttcatgaagctggaatcgctagtaatcgcggatcagaatgccgcggtgaatacgttctcgggccttgtacacaccgcccgtcataccatgagagctggtaatacccgaagccggtggcctaaccgcaaggaaggagccgtcgaaggtaggactagtgattggggtcaagtcgtaacaaggtatccctacgagaacgtggggatggatcacctcctttct

SEQ ID NO: 1740 - DNA, 1494 bp, Sphingobacterium faecium
ggctcaggatgaacgctagcggcaggcctaatacatgcaagtcggacgggattcagggagtagcttgctacgaactgatgagagtggcgcacgggtgcgtaacgcgtgagcaacctacccatatcagggggatagcctctcgaaagagagattaacaccgcataacatcatttaccggcatcggttaatgatcaaatatttataggatatggatgggctcgcgtgacattagctagttggaggggtaacggcccaccaaggctacgatgtctaggggctctgagaggagaatcccccacactggtactgagacacggaccagactcctacgggaggcagcagtaaggaatattggtcaatggagggaactctgaaccagccatgccgcgtgcaggatgactgccctatgggttgtaaactgcttttgtcagggaataaacctttctacgtgtaggaagctgaatgtacctgaagaataaggatcggctaactccgtgccagcagccgcggtaatacggaggatccaagcgttatccggatttattgggtttaaagggtgcgtaggcggtcctataagtcagtggtgaaagacggcagcttaactgtcgcagtgcctttgatactgtaggacttgaatctatttgaagtgggcggaataagacaagtagcggtgaaatgcatagatatgtcttagaactccgattgcgaaggcagctcactaagttagtattgacgctgatgcacgaaagcgtggggatcaaacaggattagataccctggtagtccacgccctaaacgatgataactcgatgtttgcgatacacagtaagcgtccaagcgaaagcgttaagttatccacctggggagtacggtcgcaagattgaaactcaaaggaattgacgggggcccgcacaagcggaggagcatgtggtttaattcgatgatacgcgaggaaccttacccgggcttgaaagttagtgaatgatccagagacggatcagtccttcgggacacgaaactaggtgctgcatggctgtcgtcagctcgtgccgtgaggtgttgggttaagtcccgcaacgagcgcaacccctatgtttagttgccagcatgtaatgatggggactctaaacagactgccagcgtaagctgtgaggaaggtggggacgacgtcaagtcatcatggcccttacgtccggggctacacacgtgctacaatggatggtacagcgggcagctacatagcaatatgatgctaatctctaaaagccattcacagttcggattgaggtctgcaactcgacctcatgaagttggattcgctagtaatcgcgtatcagcaatgacgcggtgaatacgttcccgggccttgtacacaccgcccgtcaagccatgaaagttgggggtacctaaagcatgtaaccgcaaggagcgtgttagggtaaaaccgataattggggctaagtcgtaacaaggtagccgtaccggaaggtgcgg

SEQ ID NO: 1741 - DNA, 1454 bp, Sphingobacterium mizutaii
gctcaggatgaacgctagcggcaggcctaatacatgcaagtcggacgggatccatcggtagcttgctaccgatggtgagagtggcgcacgggtgcgtaacgcgtgagcaacctgcccatatcagggggatagcccggagaaatccggattaacaccgcatgacactgctttccggcatcgggaggtagtcaaatattcataggatatggatgggctcgcgtgacattagctagttggtggggtaacggcccaccaaggcgacgatgtctaggggctctgagaggagaatcccccacactggtactgagacacggaccagactcctacgggaggcagcagtaaggaatattggtcaatgggggcaaccctgaaccagccatgccgcgtgcaggacgactgccctatgggttgtaaactgcttttgttagggaataaaccccgctacgtgtagcgggctgaatgtacctaaagaataaggatcggctaactccgtgccagcagccgcggtaatacggaggatccgagcgttatccggatttattgggtttaaagggtgcgtaggcggcactttaagtcaggggtgaaagacggcagctcaactgtcgcagtgcccttgatactgaagtgcttgaatgcggttgaagacggcggaatgagacaagtagcggtgaaatgcatagatatgtctcagaacaccgattgcgaaggcagctgtctaagccgttattgacgctgatgcacgaaagcgtggggatcgaacaggattagataccctggtagtccacgccctaaacgatgatgactcgatgtttgcgatataccgtaagcgtccaagcgaaagcgttaagtcatccacctggggagtacgcccgcaagggtgaaactcaaaggaattgacgggggcccgcacaagcggaggagcatgtggtttaattcgatgatacgcgaggaaccttacccgggcttgaaagttactgaagggcgcagagacgcgcccgtccttcgggacaggaaactaggtgctgcatggctgtcgtcagctcgtgccgtgaggtgttgggttaagtcccgcaacgagcgcaacccctatgtttagttgccagcacgtcaaggtggggactctaaacagactgcctgcgcaagcagagaggaaggcggggacgacgtcaagtcatcatggcccttacgtccggggctacacacgtgctacaatggatggtacagcgggcagctacacagcaatgtggtgccaatctcgaaaagccattcacagttcggatcggggtctgcaactcgaccccgtgaagttggattcgctagtaatcgcgtatcagcaatgacgcggtgaatacgttcccgggccttgtacacaccgcccgtcaagccatgaaagctgggggtacctaaagcatgtaaccgcaaggagcgtgttagggtaaaaccggtaattgggg

SEQ ID NO: 1742 - DNA, 1439 bp, Sphingobacterium multivorum
  modified_base (1112)..(1112): a, c, t, g, unknown or other
  modified_base (1114)..(1114): a, c, t, g, unknown or other
ggctcaggatgaacgctagcggcaggcctaatacatgcaagtcggacgggatccatcggagagcttgctcgaagatggtgagagtggcgcacgggtgcgtaacgcgtgagcaacctacctctatcagggggatagcctctcgaaagagagattaacaccgcataacatcaacagttcgcatgttcggttgattaaatatttataggatagagatgggctcgcgtgacattagctagttggtagggtaacggcttaccaaggcgacgatgtctaggggctctgagaggagaatcccccacactggtactgagacacggaccagactcctacgggaggcagcagtaaggaatattggtcaatgggcggaagcctgaaccagccatgccgcgtgcaggatgactgccctatgggttgtaaactgcttttgtccaggaataaacctaaatacgtgtatttagctgaatgtactggaagaataaggatcggctaactccgtgccagcagccgcggtaatacggaggatccgagcgttatccggatttattgggtttaaagggtgcgtaggcggcctattaagtcaggggtgaaatacggtggctcaaccatcgcagtgcctttgatactgatgggcttgaatccatttgaagtgggcggaataagacaagtagcggtgaaatgcatagatatgtcttagaactccgattgcgaaggcagctcactaagctggtattgacgctgatgcacgaaagcgtggggatcgaacaggattagataccctggtagtccacgccctaaacgatgataactcgatgttggcgatagacagccagcgtcccagcgaaagcgttaagttatccacctggggagtacgcccgcaagggtgaaactcaaaggaattgacgggggcccgcacaagcggaggagcatgtggtttaattcgatgatacgcgaggaaccttacccgggcttgaaagttagtgaagagtgcagagacgcactcgtccttcgggacacgaaactaggtgctgcatggctgtcgtcagctcgtgccgtgaggtgttgggttaagtcccgcaacgagcgcaacccctatgtttagttgccagcatgtnanggtggggactctaaacagactgcctgtgcaaacagagaggaaggtggggacgacgtcaagtcatcatggcccttacgtccggggctacacacgtgctacaatggatggtacagcgggcagctacatagcaatatgatgctaatctctaaaagccattcacagttcggattggggtctgcaactcgaccccatgaagttggattcgctagtaatcgcgtatcagcaatgacgcggtgaatacgttcccgggccttgtacacaccgcccgtcaagccatgaaagttgggggtacctaaagcatgttaccgcaaggagcgtgttaggg

SEQ ID NO: 1743 - DNA, 1527 bp, Sphingobacterium spiritivorum
ttacaatggagagtttgatcctggctcaggatgaacgctagcggcaggcctaatacatgcaagtcgaacgagattatccagcttgctggatatgaaagtggcgcacgggtgcgtaacgcgtgagcaacctacctctgtcagggggatagcccggcgaaagtcggattaacaccgcatgacattattgatgtggcatcacattataatcaaatatttataggacagagatgggctcgcgtgacattagctagttggagaggtaacggctcaccaaggcaacgatgtctaggggctctgagaggagaatcccccacactggtactgagacacggaccagactcctacgggaggcagcagtaaggaatattggtcaatggagggaactctgaaccagccatgccgcgtgcaggatgactgccctatgggttgtaaactgcttttgtcggggaataaacctacgtttgtaaacgtagctgaatgtacccgaagaataaggatcggctaactccgtgccagcagccgcggtaatacggaggatccaagcgttatccggatttattgggtttaaagggtgcgtaggcggttctttaagtcagaggtgaaagacggcagcttaactgtcgcagtgcctttgatactgaagaacttgaattaggttgaggaatgcggaatgagacaagtagcggtgaaatgcatagatatgtctcagaaccccgattgcgaaggcagcattccaagcctttattgacgctgatgcacgaaagcgtggggatcgaacaggattagataccctggtagtccacgccctaaacgatgataactcgatgttggcgatagacagtcagcgtcccagcgaaagcgttaagttatccacctggggagtacgcccgcaagggtgaaactcaaaggaattgacgggggcccgcacaagcggaggagcatgtggtttaattcgatgatacgcgaggaaccttacccgggcttgaaagttagtgaatgatccagagacggatcagtccttcgggacacgaaactaggtgctgcatggctgtcgtcagctcgtgccgtgaggtgttgggttaagtcccgcaacgagcgcaacccctatgtttagttgccagcatgtcatgatggggactctaaacagactgcctgcgcaagcagagaggaaggtggggacgacgtcaagtcatcatggcccttacgtccggggctacacacgtgctacaatggtcggtacagcgggcagctacacagtaatgtgatgccaatctctgaaagccgatcacagttcggattgaggtctgcaactcgacctcatgaagttggattcgctagtaatcgcgtatcagcaatgacgcggtgaatacgttcccgggccttgtacacaccgcccgtcaagccatgaaagttgggggtgcctaaagcatgtaaccgcaaggagcgtgttagggcaaaaccgataattggggctaagtcgtaacaaggtagccgtaccggaaggtgcggctggaatacctcctttct

SEQ ID NO: 1744 - DNA, 1463 bp, Sphingomonas echinoides
  modified_base (439)..(439): a, c, t, g, unknown or other
  modified_base (956)..(959): a, c, t, g, unknown or other
tgatcatggctcagaatgaacgctggcggcatgcctaacacatgcaagtcgaacgaaggctttggccttagtggcgcacgggtgcgtaacgcgtgggaatctgccctcaggttcggaataacagcgagaaattgctgctaataccggatgatatcgcgagatcaaagatttatcgcctgaggatgagcccgcgtaggattagctagttggtgtggtaaaggcgcaccaaggcgacgatccttagctggtctgagaggatgatcagccacactgggactgagacacggcccagactcctacgggaggcagcagtggggaatattggacaatgggcgaaagcctgatccagcaatgccgcgtgagtgatgaaggccttagggttgtaaagctcttttacccgggatgataatgacagtaccgggagaataagctccggctnactccgtgccagcagccgcggtaatacggagggagctagcgttattcggaattactgggcgtaaagcgcacgtaggcggctttgtaagttagaggtgaaagcctggagctcaactcctgaattgcctttaagactgcatcgcttgaatccaggagaggtgagtggaattccgagtgtagaggtgaaattcgtagatattcggaagaacaccagtggcgaaggcggctcactggactggtattgacgctgaggtgcgaaagcgtggggagcaaacaggattagataccctggtagtccacgccgtaaacgatgataactagctgtcggggctcttagagcttcggtggcgcacgtaacgcattaagttatccgcctggggagtacggccgcaaggttaaaactcaaatgaattgacgggggcctgcacaagcggtggagcatgtggtttaattcgaagcaacgcgcagaaccttaccagcgtttgacatgtccggacgatttcgggagaccgatctcnnnntcggggactggaacacaggtgctgcatggctgtcgtcagctcgtgtcgtgagatgttgggttaagtcccgcaacgagcgcaaccctcgtccttagttgccatcattcagttgggcactctaaggaaaccgccggtgataagccggaggaaggtggggatgacgtcaagtcctcatggcccttacgcgctgggctacacacgtgctacaatggcggtgacagtgggcagcaatctcgcaagggtgagctaatctccaaaagccgtctcagttcggattgttctctgcaactcgagagcatgaaggcggaatccgtagtaatcgcggatcagcatgccgcggtgaatacgttcccaggccttgtacacaccgcccgtcacaccatgggagttggattcacccgaaggcagtgcgctaaccgcaaggaggcagctgaccacggtgggttcagcgactggggtgaagtcgtaacaaggtagccgtaggggaacctgcggctggatcac

SEQ ID NO: 1745 - DNA, 1362 bp, Sphingomonas sp.
  oral clone FI012
gagtttgatcctggctcagaacgaacgctggcggcgtgcctaacacatgcaagtcgaacgagtggcgcacgggtgcgtaacgcgtgggaatctgcctcttgcttcggaataacagtgggaaactactgctaataccggatgatcaaagtcggcaagagatgagcccgcgtaggattaggtagttggtggggtaaaggcctaccaagccgacgatccttagctggtctgagaggatgatcagccacactgggactgagacacggcccagactcctacgggaggcagcagtggggaatattggacaatgggggcaaccctgatccagcaatgccgcgtgagtgatgaaggccttagggttgtaaagctcttttaccagggatgatgacagtacctggagaataagctccggctaactccgtgccagcagccgcggtaatacggagggagctagcgttgttcggaattactgggcgtaaagcgcacgtaggcggttactcaagtcagaggtgaaagcccggggctcaaccccggaactgcctttgaaactaggtaactagaatcctggagaggtgagtggaattccgagtgtagaggtgaaattcgtagatattcggaagaacaccagtggcgaaggcggctcactggacagattgacgctgaggtgcgaaagcgtggggagcaaacaggattagatacccaggtagtccacgccgtaaacgatgataactagctgtccgggtttgggtggcgcagctaacgcattaagttatccgcctggggagtacggtcgcaagattaaaactcaaaggaattgacgggggcctgcacaagcggtggagcatgtggtttaattcgaagcaacgcgcagaaccttaccagcgtttgacatcgacaggtgctgcatggctgtcgtcagctcgtgtcgtgagatgttgggttaagtcccgcaacgagcgcaaccctcgtccttagttgccatcatgggcactctaaggaaaccgccggtgataagccggaggaaggtggggatgacgtcaagtcctcatggcccttacacgctgggctacacacgtgctacaatggcggtcagtgggcagcgacctcgcgaggggtagctaatctccgccgtctcagttcggatgttctctgcaactcgagagcagaaggcggaatcgctagtaatcgcggatcagcatgccgcggtgaatgcgttcccaggccttgtacacaccgcccgtcacaccatgggagttggattcactcgaaggcgttaggtaggtaggcgaccacagtgggtttagcgactggggtgaagtcgtaacaaggtagccgtaggggaacctgcggttggatcacctcctt

SEQ ID NO: 1746 - DNA, 1362 bp, Sphingomonas sp.
  oral clone FZ016
gagtttgattctggctcagaacgaacgctggcggcatgcctaatacatgcaagtcgaacgagtggcgcacgggtgcgtaacgcgtgggaatctgcccttgggttcggaataacagctggaaacggctgctaataccggatgatcaaagtcgcccagggatgagcccgcgtaggattagctagttggtggggtaaaggcctaccaaggcgacgatccttagctggtctgagaggatgatcagccacactgggactgagacacggcccagactcctacgggaggcagcagtagggaatattggacaatgggggcaaccctgatccagcaatgccgcgtgagtgatgaaggccttagggttgtaaagctcttttacccgagatgatgacagtatcgggagaataagctccggctaactccgtgccagcagccgcggtaatacggagggagctagcgttgttcggaattactgggcgtaaagcgcacgtaggcggcgatttaagtcagaggtgaaagcccggggctcaaccccggaactgcctttgagactggattgcttgaatccgggagaggtgagtggaattccgagtgtagaggtgaaattcgtagatattcggaagaacaccagtggcgaaggcggctcactggaccgattgacgctgaggtgcgaaagcgtggggagcaaacaggattagataccctggtagtccacgccgtaaacgatgataactagctgccggggtttcggtggcgcagctaacgcattaagttatccgcctggggagtacggtcgcaagattaaaactcaaaggaattgacgggggcctgcacaagcggtggagcatgtggtttaattcgaagcaacgcgcagaaccttaccaacgtttgacatcgacaggtgctgcatggctgtcgtcagctcgtgtcgtgagatgttgggttaagtcccgcaacgagcgcaaccctcgcctttagttgccagcatgggtactctaaaggaaccgccggtgataagccggaggaaggtggggatgacgtcaagtcctcatgscccttacgcgttgggctacacacgtgctacaatggcgaccagtgggcagcgaccgtgcgagcggaagctaatctccgtcgtctcagttcgggcgttctctgcaactcgagagcggaaggcggaatcgctagtaatcgcggatcagcatgccgcggtgaatacgttcccaggccttgtacacaccgcccgtcacaccatgggagttggattcactcgaaggcgttagctaggcaggcgaccacagtgggtttagcgactggggtgaagtcgtaacaaggtagccgtaggggaacctgcggctggatcacctcctt

SEQ ID NO: 1747 - DNA, 1405 bp, Sphingomonas sp.
  oral taxon A09
agagtttgatcctggctcagaatgaacgctggcggcatgcctaacacatgcaagtcgaacgaagccttcgggcttagtggcgcacgggtgcgtaacgcgtgggaatctgcccttgggttcggaataacagttggaaacgactgataataccggatgatgacgtaagtccaaagatttatcgcccaaggatgagcccgcgtaggattagctagttggtgaggtaaaggctcaccaaggcgacgatccttagctggtctgagaggatgatcagccacactgggactgagacacggcccagactcctacgggaggcagcagtggggaatattggacaatgggcgaaagcctgatccagcaatgccgcgtgagtgatgaaggccttagggttgtaaagctcttttacccgggatgataatgacagtaccgggagaataagctccggctaactccgtgccagcagccgcggtaatacggagggagctagcgttattcggaattactgggcgtaaagcgcacgtaggcggctttgtaagttagaggtgaaagcccagagctcaactctggaattgcctttaagactgcatcgcttgaatccaggagaggtgagtggaattccgagtgtagaggtgaaattcgtagatattcggaagaacaccagtggcgaaggcggctcactggactggtattgacgctgaggtgcgaaagcgtggggagcaaacaggattagataccctggtagtccacgccgtaaacgatgataactagctgttcggggacttagtccgtgagtggcgcagctaacgcattaagttatccgcctggggagtacggccgcaaggttaaaactcaaatgaattgacgggggcctgcacaagcggtggagcatgtggtttaattcgaagcaacgcgcagaaccttaccagcgtttgacatggtaggacgactggcagagatgcctttcttcccttcggggacctacacacaggtgctgcatggctgtcgtcagctcgtgtcgtgagatgttgggttaagtcccgcaacgagcgcaaccctcgcctttagttgccatcatttagttgggcactctaaaggaaccgccggtgataagccggaggaaggtggggatgacgtcaagtcctcatggcccttacgcgctgggctacacacgtgctacaatggcggtgacagtgggcagcaatcccgcaagggggagctaatctccaaaagccgtctcagttcggattgcactctgcaactcgagtgcatgaaggcggaatcgctagtaatcgcggatcagcacgccgcggtgaatacgttcccaggccttgtacacaccgcccgtcacaccatgggagttgggttcacccgaaggcgttgcgctaactcgcaagagaggcaggcgacc

SEQ ID NO: 1748 - DNA, 1450 bp, Sphingomonas sp.
  oral taxon F71
agagtttgatcctggctcagaacgaacgctggcggcacgcctaacacatgcaagtcgaacgaaggcttcggccttagtggcgcacgggtgcgtaacgcgtgggaatctgcccttgggtctgggataacggcgggaaactgccgctaataccggatgatatcgcgagatcaaagatttatcgcctgaggatgagcccgcgtaggattaggtagttggtgtggtaaaggcgcaccaagccgacgatccttagctggtctgagaggatgatcagccacactgggactgagacacggcccagactcctacgggaggcagcagtggggaatattggacaatgggcgcaagcctgatccagcaatgccgcgtgagtgatgaaggccttagggttgtaaagctcttttacccgggaagataatgactgtaccgggagaataagccccggctaactccgtgccagcagccgcggtaatacggagggggctagcgttgttcggaattactgggcgtaaagcgcacgtaggcggctttgtaagtcaggggtgaaagcctggagctcaactccagaactgcctttgagactgcatcgcttgaatccgggagaggtgagtggaattccgagtgtagaggtgaaattcgtagatattcggaagaacaccagtggcgaaggcggctcactggaccggtattgacgctgaggtgcgaaagcgtggggagcaaacaggattagataccctggtagtccacgccgtaaacgatgataactagctgtccgggggcttggcctttgggtggcgcagctaacgcattaagttatccgcctggggagtacggccgcaaggttaaaactcaaaggaattgacgggggcctgcacaagcggtggagcatgtggtttaattcgaagcaacgcgcagaaccttaccagcgtttgacatgtccggacgactggcagagatgcctttcttcccttcggggactggaacacaggtgctgcatggctgtcgtcagctcgtgtcgtgagatgttgggttaagtcccgcaacgagcgcaaccctcgcctttagttaccatcatttggttgggtactctaaaggaaccgccggtgataagccggaggaaggtggggatgacgtcaagtcctcatggcccttacgcgctgggctacacacgtgctacaatggcggtgacagtgggcagcaatcccgcgagggtgagctaatctccaaaagccgtctcagttcggattgttctctgcaactcgagagcatgaaggcggaatcgctagtaatcgcggatcagcatgccgcggtgaatacgttcccaggccttgtacacaccgcccgtcacaccatgggagttgggttcacccgaaggcgttgcactaactcgcaagagaggcaggcgaccacggtgggcttagcgactggggtgaagtcgtaacaaggtagccgt

SEQ ID NO: 1749 - DNA, 1484 bp, Sphingopyxis alaskensis
ttgagagtttgatcctggctcagaacgaacgctggcggcatgcctaacacatgcaagtcgaacgagaccttcgggtctagtggcgcacgggtgcgtaacgcgtgggaatctgcccttgggtacggaataactcagagaaatttgagctaataccgtataatgacttcggtccaaagatttatcgcccaaggatgagcccgcgtaagattagctagttggtggggtaaaggcctaccaaggcgacgatctttagctggtctgagaggatgatcagccacactgggactgagacacggcccagactcctacgggaggcagcagtggggaatattggacaatgggcgaaagcctgatccagcaatgccgcgtgagtgatgaaggccttagggttgtaaagctcttttacccgggatgataatgacagtaccgggagaataagctccggctaactccgtgccagcagccgcggtaatacggagggagctagcgttgttcggaattactgggcgtaaagcgcgcgtaggcggttttttaagtcagaggtgaaagcccagtgctcaacactggaactgcctttgaaactggaaaacttgaatcttggagaggtcagtggaattccgagtgtagaggtgaaattcgtagatattcggaagaacaccagtggcgaaggcgactgactggacaagtattgacgctgaggtgcgaaagcgtggggagcaaacaggattagataccctggtagtccacgccgtaaacgatgataactagctgtccgggttcatggaacttgggtggcgcagctaacgcattaagttatccgcctggggagtacggtcgcaagattaaaactcaaaggaattgacgggggcctgcacaagcggtggagcatgtggtttaattcgaagcaacgcgcagaaccttaccagcgtttgacatcctgatcgcggattagagagatcttttccttcagttcggctggatcagtgacaggtgctgcatggctgtcgtcagctcgtgtcgtgagatgttgggttaagtcccgcaacgagcgcaaccctcatccctagttgccatcattcagttgggcactctaaggaaactgccggtgataagccggaggaaggtggggatgacgtcaagtcctcatggcccttacgcgctgggctacacacgtgctacaatggcaactacagtgggcagcaacctcgcgaggggtagctaatctccaaaagttgtctcagttcggattgttctctgcaactcgagagcatgaaggcggaatcgctagtaatcgcggatcagcatgccgcggtgaatacgttcccaggccttgtacacaccgcccgtcacaccatgggagttggtttcacccgaaggcagtgctctaacccgcaagggaggaagctgaccacggtgggatcagcgactggggtgaagtcgtaacaaggtagccgtaggggaacctgcggctggatcacctcctt

SEQ ID NO: 1750 - DNA, 1515 bp, Spiroplasma insolitum
tggagagtttgatcctggctcaggatgaacgctggcggcatgcctaatacatgcaagtcgaacggggtgcttgcacccagtggcgaacgggtgagtaacacgtatctaatctacccattagcgggggataacagttggaaacgactgctaataccgcatacgacattttctggcatcagagaatgttaaaaggtccgtttggaccactaatggatgagggtgcggcgtattagttagttggtggggtaatggcctaccaagacaatgatacgtagccgaactgagaggttgaacggccacatcgggactgagacacggcccgaactcctacgggaggcagcagtagggaatttttcacaatgggcgaaagcctgatggagcaatgccgcgtgactgaagacggtcttcggattgtaaaggtctgttgtaagggaagaacagtaagtataggaaatgatacttatttgacggtaccttaccagaaagccacggctaactatgtgccagcagccgcggtaatacataggtggcaagcgttatccggatttattgggcgtaaagcgtgcgcagacggtttaacaagtttggggtcaaattctggagcttaactccagttcgccttgaaaactgttaagctagagtgtaggagaggtcgatggaattccatgtgtagcggtgaaatgcgtagatatatggaggaacaccagtggcgaaggcggtcgactggcctatcactgacgtttaggcacgaaagcgtagggagcaaataggattagataccctagtagtctacgccgtaaacgatgagtactaagtgtcggactaagttcggtgctgcagctaacgcattaagtactccgcctgagtagtatgctcgcaagagtgaaactcaaaggaattgacggggacccgcacaagcggtggagcatgtggtttaattcgaagcaacgcgaagaaccttaccaaggcttgacatccagtgcaaagctgtagaaatacagtggaggttaacattgagacaggtggtgcatggttgtcgtcagctcgtgccgtgaggtgtttggttaagtccagtaacgagcgcaacccttgccgttagttactccattaagttgagatactctaacgggactgctagtgtaagctagaggaaggtggggatgacgtcaaatcatcatgccccttatgtcttgggctacacacgtgctacaatggccggtacaaacagttgcgatctcgtaagagggagctaatctgaaaaagccggtctcagttcggattgagggctgcaactcgccctcataaagccggaatcgctagtaatcgcgaatcagcaatgtcgcggtgaatacgttctcgggtcttgtacacaccgcccgtcacaccatgagagttgataataccagaagtcggtattctaaccgtaaggaggaagccgcccaaggtaggattgatgattagggtgaagtcgtaacaaggtatccgtacgagaacgtgcggctggatcacctcctt

SEQ ID NO: 1751 - DNA, 1506 bp, Sporobacter termitidis
  modified_base (361)..(361): a, c, t, g, unknown or other
  modified_base (377)..(377): a, c, t, g, unknown or other
  modified_base (863)..(863): a, c, t, g, unknown or other
  modified_base (1094)..(1094): a, c, t, g, unknown or other
  modified_base (1104)..(1104): a, c, t, g, unknown or other
  modified_base (1110)..(1110): a, c, t, g, unknown or other
agagtttgatcctggctcaggacgaacgctggcggcgtgcctaacacatgcaagtcgaacggagacaattggttcgctgattgtcttagtggcggacgggtgagtaacgcgtgagcaatctgcccttcggagggggacaacagctggaaacggctgctaataccgcataatgtatattcaaggcatcttggatataccaaagatttatcgccgaaggatgagctcgcgtctgattagctagttggtgaggtaaaggctcaccaaggctgcgatcagtagccggactgagaggttgaacggccacattggaactgagatacgggccagactcctacgggagggagcagtggggaattttggncaatgggggaaagccntacccagcaacgccgcgtgaaggaagaaggccttcgggttgtaaacttctttgaccagggacgaaacaaatgacggtacctggaaaacaagccacggctaactacgtgccagcagccgcggtattacgtaggtggcaagcgttgtccggatttactgggtgtaaagggcgcgtaggcgggagtacaagtcagatgtgaaatctgggggcttaaccctcaaactgcatttgaaactgtatttcttgagtatcggagaggcaggcggaattcctagtgtagcggtgaaatgcgttgatattaggaggaacaccagtggcgaaggcggcctgctggacgacaactgactctgaggcgcgaaagcgtggggagcaaacaggattagataccctggtagtccacgctgtaaacgatgaatactaggtgtggggggactgaccccctccgtgccggagttaacacaataagtattccacctggggagtacgnccgcaaggttgaaactcaaaggaattgacgggggcccgcacaagcagtggattatgtggtttaattcgaagcaacgcgaagaaccttaccagggcttgacatcgtactaacgaagcagagatgcattaggtgcccttccggggaaagtatagacaggtggtgcatggttgtcgtcagctcgtgtcgtgagatgttgggttaagtcccgcaacgagcgcaacccctattgtnatttgctacncgagancactctagcgaggctgccgatgacaaaccggaggaaggtggggacgacgtcaaatcatcatgccccttatgtcctgggctacacacgtaatacaatgtctctcacagagggaagcaagaccgcgaggtggagcaaatccctaaaatgcgtctcagttcagattgcaggctgcaactcgcctgcatgaagtcggaattgctagtaatcgcggatcagcatgccgcggtgaatacgttcccgggccttgtacacaccgcccgtcacaccatgagagccgggaacacccgaagtccgtagtctaaccgcaagggggacgcggccgaaggtgggtttggtaattggggtgaagtcgtaacaaggtagccgtatcggaaggtgcggctggatcacctcctt

SEQ ID NO: 1752 - DNA, 1503 bp, Sporolactobacillus inulinus
  modified_base (62)..(62): a, c, t, g, unknown or other
  modified_base (174)..(174): a, c, t, g, unknown or other
  modified_base (243)..(243): a, c, t, g, unknown or other
gacgaacgctggcggcgtgcctaatacatgcaagtcgagcgcacagaagggagcttgctccnggacgtgagcggcggatgggtgagtaacacgtgggcaacctgcctgtaagacggggataacttcgggaaaccggagctaataccggataatccctcgcaccgcatggtgcgnggttgaaagatggtttcggccatcacttacagatgggcccgcggtgcattagttagttggcggggtaanggcccaccaagaccgcgatgcatagccgacctgagagggtgatcggccacattgggactgagacacggcccaaactcctacgggaggcagcagtagggaatcttccacaatggacgaaagtctgatggagcaacgccgcgtgagcgaagaaggttttcggatcgtaaagctctgttgccggagaagaacgagtgccagaggaaatgctggtgctgtgacggtatccggccagaaagccacggctaactacgtgccagcagccgcggtaatacgtaggtggcaagcgttgtccggaattattgggcgtaaagcgcgcgcaggcggcttcttaagtctgatgtgaaatcttgcggctcaaccgcaaaaggtcattggaaactggggagcttgagtgcagaagaggagagtagaattccacgtgtagcggtgaaatgcgtagagatgtggaggaataccagtggcgaaggcggctctctggtctgttactgacgctgaggtgcgaaagcatggggagcaaacaggattagataccctggtagtccatgccgtaaacgatgaatgctaggtgttaggggggtccaaccccttagtgctgaagttaacacattaagcattccgcctggggagtacgaccgcaaggttgaaactcaaaggaattgacgggggcccgcacaagcagtggagcatgtggtttaattcgaagcaacgcgaagaaccttaccaggtcttgacatcctctgacaagtctagagataggccgttccccttcgggggacagagtgacaggtggtgcatggttgtcgtcagctcgtgtcgtgagatgttgggttaagtcccgcaacgagcgcaacccttgatcttagttgccagcattaagttgggcactctaaggtgactgccggtgacaaaccggaggaaggtggggatgacgtcaaatcatcatgccccttatgatctgggctacacacgtgctacaatgggcggtacaaagggcagcgaaaccgcaaggtcaagccaatcccataaagccgcccccagttcggattgcaggctgcaactcgcctgcatgaagccggaattgctagtaatcgcggatcagcatgccgcggtgaatccgttcccgggccttgtacacaccgcccgtcacaccacgagagtttgtaacacccgaagtcggtgtgggaacctttatggacccagccgccgaaggtgggacaaatgattggggtgaagtcgtaacaaggtagccgtatcggaagg

SEQ ID NO: 1753 - DNA, 1518 bp, Sporolactobacillus nakayamae
tttcctggctcaggacgaacgctggcggcgtgcctaatacatgcaagtcgagcgcattgaagggagcttgctcccggatgtgagcggcggatgggtgagtaacacgtgggtaacctgcctgtcagattgggataactgtgggaaaccgcagctaataccgaatgatcccctgcaccacatggtgcagggttgaaagatggtttcggccatcactgacagatgggcccgcggtgcattagttagttggcggggtaacggcccaccaagacagcgatgcatagccgacctgagagggtgatcggccacattgggactgagacacggcccaaactcctacgggaggcagcagtagggaatcttccacaatggacgaaagtctgatggagcaacgccgcgtgagcgaagaaggttttcggatcgtaaagctctgttgccggagaagaatgagtatgagaggaaatgcttgtactgtgacggtatccggccagaaagccacggctaactacgtgccagcagccgcggtaatacgtaggtggcaagcgttgtccggaattattgggcgtaaagcgcgcgcaggcggcttcttaagtctgatgtgaaatcttgcggctcaaccgcaaatggtcattggaaactgggaagcttgagtgcagaagaggagagtagaattccacgtgtagcggtgaaatgcgtagatatgtggaggaataccagtggcgaaggcggctctctggtctgtaactgacgctgaggcgcgaaagcgtggggagcaaacaggattagataccctggtagtccacgccgtaaacgatgaatgctaggtgttagggggtccaacccttagtgctgaagttaacacattaagcattccgcctggggagtacgaccgcaaggttgaaactcaaaggaattgacgggggcccgcacaagcagtggagcatgtggtttaattcgaagcaacgcgaagaaccttaccaggtcttgacatcctctgacaagtctagagataggccgttccccttcgggggacagagtgacaggtggtgcatggttgtcgtcagctcgtgtcgtgagatgttgggttaagtcccgcaacgagcgcaacccttgatcttagttgccagcattcagttgggcactctaaggtgactgccggtgacaaaccggaggaaggtggggatgacgtcaaatcatcatgccccttatgatctgggctacacacgtgctacaatgggtggtacaaagggcagcgaaaccgcgaggtcaagcgaatcccataaagccacccccagttcggattgcaggctgcaactcgcctgcatgaagccggaattgctagtaatcgcggatcagcatgccgcggtgaatccgttcccgggccttgtacacaccgcccgtcacaccacgagagtttgtaacacccgaagtcggtgcgagaacctttatgggctcagccgccgaaggtgggacagatgattggggtgaagtcgtaacaaggtagccgtatcggaaggtgcg

SEQ ID NO: 1754 - DNA, 1539 bp, Sporosarcina newyorkensis
agagtttgatcctggctcaggacgaacgctggcggcgtgcctaatacatgcaagtcgagcgaatctttgggagcttgctcccaaagattagcggcggacgggtgagtaacacgtgggcaacctaccttacagatggggataactccgggaaaccggggctaataccgaataatccatttcttcgcatgaagagatgttgaaagacggtttcggctgtcactgtgagatgggcccgcggcgcattagttagttggtggggtaacggcctaccaagaccacgatgcgtagccgacctgagagggtgatcggccacactgggactgagacacggcccagactcctacgggaggcagcagtagggaatcttccacaatggacgaaagtctgatggagcaacgccgcgtgagtgaagaaggttttcggatcgtaaagctctgttgtaagggaagaacacgtacaggagtaactgcctgtaccttgacggtaccttaccagaaagccacggctaactacgtgccagcagccgcggtaatacgtaggtggcaagcgttgtccggaattattgggcgtaaagcgcgcgcaggcggtcctttaagtctgatgtgaaagcccacggctcaaccgtggagggtcattggaaactggaggacttgagtacagaagaggaaagcggaattccacgtgtagcggtgaaatgcgtagagatgtggaggaacaccagtggcgaaggcggctttctggtctgtaactgacgctgaggcgcgaaagcgtggggagcaaacaggattagataccctggtagtccacgccgtaaacgatgagtgctaagtgttagggggtttccgccccttagtgctgcagctaacgcattaagcactccgcctggggagtacggccgcaaggctgaaactcaaaggaattgacggggacccgcacaagcggtggagcatgtggtttaattcgaagcaacgcgaagaaccttaccaggtcttgacatcccgctgcccggcatggagacatgctttcccttcggggacagcggtgacaggtggtgcatggttgtcgtcagctcgtgtcgtgagatgttgggttaagtcccgcaacgagcgcaacccttaatcttagttgccatcattcagttgggcactctaaggtgactgccggtgacaaaccggaggaaggtggggatgacgtcaaatcatcatgccccttatgacctgggctacacacgtgctacaatggacggtacagagggctgcaaacccgcgagggggagccaatcccacaaaaccgttcccagttcggattgcaggctgcaactcgcctgcatgaagccggaatcgctagtaatcgtggatcagcatgccacggtgaatacgttcccgggtcttgtacacaccgcccgtcacaccacgagagtttgtaacacccgaagtcggtggggtaacccttacgggagccagccgccgaaggtgggacagatgattggggtgaagtcgtaacaaggtagccgtatcggaaggtgcggctggatcacct

SEQ ID NO: 1755 - DNA, 1474 bp, Sporosarcina sp.
  2681
gacgaacgctggcggcgtgcctaatacatgcaagtcgagcgratcttygggagcttgctccyraagrttagcggcggacgggtgagtaacacgtgggcaacctaccttacagatggggataactccgggaaaccggggctaataccgaataatccatytcttcgcatgragagatgttgaaagacggtttcggctgtcactgtgagatgggcccgcggcgcattagttagttggtggggtaacggcctaccaagaccacgatgcgtagccgacctgagagggtgatcggccacactgggactgagacacggcccagactcctacgggaggcagcagtagggaatcttccacaatggacgaaagtctgatggagcaacgccgcgtgagtgaagaaggttttcggatcgtaaagctctgttgtaagggaagaacacgtacaggagtaactgcctgtaccttgacggtaccttaccagaaagccacggctaactacgtgccagcagccgcggtaatacgtaggtggcaagcgttgtccggaattattgggcgtaaagcgcgcgcaggcggtcctttaagtctgatgtgaaagcccacggctcaaccgtggagggtcattggaaactggaggacttgagtacagaagaggaaagcggaattccacgtgtagcggtgaaatgcgtagagatgtggaggaacaccagtggcgaaggcggctttctggtctgtaactgacgctgaggcgcgaaagcgtggggagcaaacaggattagataccctggtagtccacgccgtaaacgatgagtgctaagtgttagggggtttccgccccttagtgctgcagctaacgcattaagcactccgcctggggagtacggccgcaaggctgaaactcaaaggaattgacggggacccgcacaagcggtggagcatgtggtttaattcgaagcaacgcgaagaaccttaccaggtcttgacatcccgctgcccggcatggagacatgcytttcccttcggggacagcggtgacaggtggtgcatggttgtcgtcagctcgtgtcgtgagatgttgggttaagtcccgcaacgagcgcaacccttaatcttagttgccatcattyagttgggcactctaaggtgactgccggtgacaaaccggaggaaggtggggatgacgtcaaatcatcatgccccttatgacctgggctacacacgtgctacaatggacggtacagagggctgcaaacccgcgagggggagccaatcccacaaaaccgttcccagttcggattgcaggctgcaactcgcctgcatgaagccggaatcgctagtaatcgtggatcagcatgccacggtgaatacgttcccgggtcttgtacacaccgcccgtcacaccacgagagtttgtaacacccgaagtcggtggggtaacccttacgggagccagccgccgaaggtgggacagatgattggggtg

SEQ ID NO: 1756 - DNA, 1509 bp, Staphylococcaceae bacterium NML 92-0017
gatgaacgctggcggcgtgcctaatacatgcaagtcgagcgcgactgattacaccgtycttcggracaccgtaatcatcgagcggcggacgggtgagtaacacgtgggcaacctacccttaagactgggataaccgcgggaaaccgtggctaataccggataatacttttatacaacggtatagaagttgaaaggtggatttctatcacttaaggatgggcctgcggcgcattagctggttggtaaggtaacggcttaccaaggcgacgatgcgtagccgacctgagagggtgatcggccacactggaactgagacacggtccagactcctacgggaggcagcagtagggaatcttccgcaatgggcgaaagcctgacggagcaacgccgcgtgtgcgaagaaggtcttcggatcgtaaagcactgttgttaaggaagaacgacagtaagagtaactgyttactgtgtgacggtacttaaccagaaagccacggctaactacgtgccagcagccgcggtaatacgtaggtggcaagcgttatccggaattattgggcgtaaagcgcgcgtaggcggcgagattagtctgatgtgaaagcccccggctcaaccggggaaggtcattggaaactgtttcgcttgagtgcagaagaggagagtggaattccatgtgtagcggtgaaatgcgcagagatatggaggaacaccagtggcgaaggcggctctctggtctgcaactgacgctgatgtgcgaaagcgtggggatcaaacaggattagataccctggtagtccacgccgtaaacgatgagtgctaagtgttagggggtttccgccccttagtgctgcagcaaacgcattaagcactccgcctggggagtacggccgcaaggctgaaactcaaaggaattgacggggacccgcacaagcggtggagcatgtggtttaattcgaagcaacgcgaagaaccttaccaaatcttgacatcctctgaccgtcatggagacatgattttccctttgggacagagagacaggtggtgcatggttgtcgtcagctcgtgtcgtgagatgttgggttaagtcccgcaacgagcgcaacccttaactttagttgccatcattcagttgggcactctagagtgactgccggtgacaaaccggaggaaggtggggatgacgtcaaatcatcatgccccttatgatttgggcgacacacgtgctacaatggacaggaacaaagggcagcgaaactgtgaagtcaagcgaatcccataaaactgttctcagttcggattggagtctgcaactcgactccatgaagctggaatcgctagtaatcgtggatcagaatgccacggtgaatacgttcccgggtcttgtacacaccgcccgtcacaccacgaaagttggtaacacctgaagccggtggcctaaccatttggagggagccgtcgaaggtgggaccgatgattggggtgaagtcgtaacaaggtagccgtatcggaagg

SEQ ID NO: 1757 - DNA, 1401 bp, Staphylococcus aureus
  modified_base (48)..(48): a, c, t, g, unknown or other
  modified_base (1392)..(1392): a, c, t, g, unknown or other
agcgaacggacgagaagcttgcttctctgatgttagcggcggacgggngagtaacacgtggataacctacctataagactgggataacttcgggaaaccggagctaataccggataatattttgaaccgcatggttcaaaagtgaaagacggtcttgctgtcacttatagatggatccgcgctgcattagctagttggtaaggtaacggcttaccaaggcaacgatgcatagccgacctgagagggtgatcggccacactggaactgagacacggtccagactcctacgggaggcagcagtagggaatcttccgcaatgggcgaaagcctgacggagcaacgccgcgtgagtgatgaaggtcttcggatcgtaaaactctgttattagggaagaacatatgtgtaagtaactgtgcacatcttgacggtacctaatcagaaagccacggctaactacgtgccagcagccgcggtaatacgtaggtggcaagcgttatccggaattattgggcgtaaagcgcgcgtaggcggttttttaagtctgatgtgaaagcccacggctcaaccgtggagggtcattggaaactggaaaacttgagtgcagaagaggaaagtggaattccatgtgtagcggtgaaatgcgcagagatatggaggaacaccagtggcgaaggcgactttctggtctgtaactgacgctgatgtgcgaaagcgtggggatcaaacaggattagataccctggtagtccacgccgtaaacgatgagtgctaagtgttagggggtttccgccccttagtgctgcagctaacgcattaagcactccgcctggggagtacgaccgcaaggttgaaactcaaaggaattgacggggacccgcacaagcggtggagcatgtggtttaattcgaagcaacgcgaagaaacttaccaaatcttgacatcctttgaccactctagagatagagccttccccttcgggggacaaagtgacaggtggtgcatggttgtcgtcagctcgtgtcgtgagatgttgggttaagtcccgcaacgagcgcaacccttaagcttagttgccatcattaagttgggcactctaagttgactgccggtgacaaaccggaggaaggtggggatgacgtcaaatcatcatgccccttatgatttgggctacacacgtgctacaatggacaatacaaagggcagcgaaaccgcgaggtcaagcaaatcccataaagttgttctcagttcggattgtagtctgcaactcgactacatgaagctggaatcgctagtaatcgtagatcagcatgctacggtgaatacgttcccgggtcttgtacacaccgcccgtcacaccacgagagtttgtaacacccgaagccggtggagtanccttttagg

SEQ ID NO: 1758 - DNA, 1410 bp, Staphylococcus auricularis
tcgagcgaacagataaggagcttgctcctttgacgttagcggcggacgggtgagtaacacgtgggtaacctacctataagactggaataactccgggaaaccggggctaatgccggataacatgttgaaccgcatggttctacagtgaaaggcggctttgctgtcacttatagatggacccgcgccgtattagctagttggtgaggtaacggctcaccaaggcaacgatacgtagccgacctgagagggtgatcggccacactggaactgagacacggtccagactcctacgggaggcagcagtagggaatcttccgcaatgggcgaaagcctgacggagcaacgccgcgtgagtgatgaaggtcttcggatcgtaaaactctgttattagggaagaacaaatgcgtaagtaactgtgcgcgtcttgacggtacctaatcagaaagccacggctaactacgtgccagcagccgcggtaatacgtaggtggcaagcgttatccggaattattgggcgtaaagcgcgcgtaggcggttttttaagtctgatgtgaaagcccacggctcaaccgtggagggtcattggaaactgaaaaacttgagtgcagaagaggaaagtggaattccatgtgtagcggtgaaatgcgcagagatatggaggaacaccagtggcgaaggcgactttctggtctgtaactgacgctgatgtgcgaaagcgtggggatcaaacaggattagataccctggtagtccacgccgtaaacgatgagtgctaagtgttaggggggtttccgccccttagtgctgcagctaacgcattamgcactccgcctggggagtacggccgcaaggcttaaactcaaaggaattgacggggacccgcacaagcggtggagcatgtggtttaaattcgaagcaacgcgaagaaccttaccaaatcttgacatcctttgaccgctctagagatagagtcttccccttcgggggacaaagtgacaggtggtgcatggttgtcgtcagctcgtgtcgtgagatgttgggttaagtcccgcaacgagcgcaacccttaagcttagttgccatcattcagttgggcactctaagttgactgccggtgacaaaccggaggaaggtggggatgacgtcaaatcatcatgccccttatgatttgggctacacacgtgctacaatggacaatacaaagggcagcgaaaccgcgaggtcaagcaaatcccataaagttgttctcagttcggattgtagtctgcaactcgactacatgaagctggaatcgctagtaatcgtagatcagcatgctacggtgaatacgttcccgggtcttgtacacaccgcccgtcacaccacgagagtttgtaacacccgaagtcggtagagtaaccttttggagcta

SEQ ID NO: 1759 - DNA, 1549 bp, Staphylococcus capitis
tggagagtttgatcctggctcaggatgaacgctggcggcgtgcctaatacatgcaagtcgagcgaacagacgaggagcttgctcctctgacgttagcggcggacgggtgagtaacacgtggataacctacctataagactgggataacttcgggaaaccggagctaataccggataacatgttgaaccgcatggttcaacagtgaaagacggtcttgctgtcacttatagatggatccgcgccgcattagctagttggtaaggtaacggcttaccaaggcaacgatgcgtagccgacctgagagggtgatcggccacactggaactgagacacggtccagactcctacgggaggcagcagtagggaatcttccgcaatgggcgaaagcctgacggagcaacgccgcgtgagtgaagaaggtcttcggatcgtaaaactctgttattagggaagaacaaatgtgtaagtaactatgcacgtcttgacggtacctaatcagaaagccacggctaactacgtgccagcagccgcggtaatacgtaggtggcaagcgttatccggaattattgggcgtaaagcgcgcgtaggcggttttttaagtctgatgtgaaagcccacggctcaaccgtggagggtcattggaaactggaaaacttgagtgcagaagaggaaagtggaattccatgtgtagcggtgaaatgcgcagagatatggaggaacaccagtggcgaaggcgactttctggtctgtaactgacgctgatgtgcgaaagcgtggggatcaaacaggattagataccctggtagtccacgccgtaaacgatgagtgctaagtgttagggggtttccgccccttagtgctgcagctaacgcattaagcactccgcctggggagtacgaccgcaaggttgaaactcaaaggaattgacggggacccgcacaagcggtggagcatgtggtttaattcgaagcaacgcgaagaaccttaccaaatcttgacatcctctgacccctctagagatagagttttccccttcgggggacagagtgacaggtggtgcatggttgtcgtcagctcgtgtcgtgagatgttgggttaagtcccgcaacgagcgcaacccttaagcttagttgccatcattaagttgggcactctaagttgactgccggtgacaaaccggaggaaggtggggatgacgtcaaatcatcatgccccttatgatttgggctacacacgtgctacaatggacaatacaaagggtagcgaaaccgcgaggtcaagcaaatcccataaagttgttctcagttcggattgtagtctgcaactcgactacatgaagctggaatcgctagtaatcgtagatcagcatgctacggtgaatacgttcccgggtcttgtacacaccgcccgtcacaccacgagagtttgtaacacccgaagccggtggagtaaccttttggagctagccgtcgaaggtgggacaaatgattggggtgaagtcgtaacaaggtagccgtatcggaaggtgcggctggatcacctcctttct

SEQ ID NO: 1760 - DNA, 1551 bp, Staphylococcus caprae
tggagagtttgatcctggctcaggatgaacgctggcggcgtgcctaatacatgcaagtcgagcgaacagacgaggagcttgctcctttgacgttagcggcggacgggtgagtaacacgtggataacctacctataagactgggataacttcgggaaaccggagctaataccggataacatgttgaaccgcatggttcaacagtgaaagacggtcttgctgtcacttatagatggatccgcgccgcattagctagttggtaaggtaacggcttaccaaggcaacgatgcgtagccgacctgagagggtgatcggccacactggaactgagacacggtccagactcctacgggaggcagcagtagggaatcttccgcaatgggcgaaagcctgacggagcaacgccgcgtgagtgaagaaggtcttcggatcgtaaaactctgttattagggaagaacaaatgtgtaagtaactatgcacgtcttgacggtacctaatcagaaagccacggctaactacgtgccagcagccgcggtaatacgtaggtggcaagcgttatccggaattattgggcgtaaagcgcgcgtaggcggttttttaagtctgatgtgaaagcccacggctcaaccgtggagggtcattggaaactggaaaacttgagtgcagaagaggaaagtggaattccatgtgtagcggtgaaatgcgcagagatatggaggaacaccagtggcgaaggcgactttctggtctgtaactgacgctgatgtgcgaaagcgtggggatcaaacaggattagataccctggtagtccacgccgtaaacgatgagtgctaagtgttagggggtttccgccccttagtgctgcagctaacgcattaagcactccgcctggggagtacgaccgcaaggttgaaactcaaaggaattgacggggacccgcacaagcggtggagcatgtggtttaattcgaagcaacgcgaagaaccttaccaaatcttgacatcctctgatcccctctagagatagagttttccccttcgggggacagagtgacaggtggtgcatggttgtcgtcagctcgtgtcgtgagatgttgggttaagtcccgcaacgagcgcaacccttaagcttagttgccatcattaagttgggcactctaagttgactgccggtgacaaaccggaggaaggtggggatgacgtcaaatcatcatgccccttatgatttgggctacacacgtgctacaatggacaatacaaagggtagcgaaaaccgcgaggtcaagcaaatcccataaagttgttctcagttcggattgtagtctgcaactcgactacatgaagctggaatcgctagtaatcgtagatcagcatgctacggtgaatacgttcccgggtcttgtacacaccgcccgtcacaccacgagagtttgtaacacccgaagccggtggagtaaccttttggagctagccgtcgaaggtgggacaaatgattggggtgaagtcgtaacaaggtagccgtatcggaaggtgcggctggatcacctcctttct

SEQ ID NO: 1761 - DNA, 1555 bp, Staphylococcus carnosus
ttttatggagagtttgatcctggctcaggatgaacgctggcggcgtgcctaatacatgcaagtcgagcgaacagacgaggagcttgctcctctgacgttagcggcggacgggtgagtaacacgtgggtaacctacctataagactggaataactccgggaaaccggggctaatgccggataatatgcagaaccgcatggttctgcaatgaaagacggttttgctgtcacttatagatggacccgcgccgtattagctagttggtaaggtaacggcttaccaaggcaacgatacgtagccgacctgagagggtgatcggccacactggaactgagacacggtccagactcctacgggaggcagcagtagggaatcttccgcaatgggcgaaagcctgacggagcaacgccgcgtgagtgatgaaggtcttcggatcgtaaaactctgttattagggaagaacaagtgcgtaggtaactatgcgcaccttgacggtacctaatcagaaagccacggctaactacgtgccagcagccgcggtaatacgtaggtggcaagcgttatccggaattattgggcgtaaagcgcgcgtaggcggttttttaagtctgatgtgaaagcccacggctcaaccgtggagggtcattggaaactggaaaacttgagtgcagaagaggaaagtggaattccatgtgtagcggtgaaatgcgcagagatatggaggaacaccagtggcgaaggcgactttctggtctgcaactgacgctgatgtgcgaaagcgtggggatcaaacaggattagataccctggtagtccacgccgtaaacgatgagtgctaagtgttagggggtttccgccccttagtgctgcagctaacgcattaagcactccgcctggggagtacggccgcaaggctgaaactcaaaggaattgacggggacccgcacaagcggtggagcatgtggtttaattcgaagcaacgcgaagaaccttaccaaatcttgacatcctttgaccgctctagagatagagtcttccccttcgggggacaaagtgacaggtggtgcatggttgtcgtcagctcgtgtcgtgagatgttgggttaagtcccgcaacgagcgcaacccttaagcttagttgccagcattaagttgggcactctaagttgactgccggtgacaaaccggaggaaggtggggatgacgtcaaatcatcatgccccttatgatttgggctacacacgtgctacaatggacagtacaaagggcagcgaaaccgcgaggtcaagcaaatcccataaagctgttctcagttcggattgtagtctgcaactcgactacatgaagctggaatcgctagtaatcgtagatcagcatgctacggtgaatacgttcccgggtcttgtacacaccgcccgtcacaccacgagagttcgtaacacccgaagccggtggagtaaccttttaggagctagccgtcgaaggtgggacgaatgattggggtgaagtcgtaacaaggtagccgtatcggaaggtgcggctggatcacctcctttct

SEQ ID NO: 1762 - DNA, 1232 bp, Staphylococcus cohnii
gcaagtcgagcgagcggcggacgggtgagtaacacgtgggtaacctacctataagactggaataactccgggaaaccggggctaatgccggataacgaaagttacttatagatggacccgcgccgtattagctagttggtaaggtaacggcttaccaaggcaacgaaacgtagccgacctgagagggggatcgtccacactggaactgagacacggtccagactcctaccggaggcagcagtagggaatcttccgcaatgggcgaaagcctgacggagcaacgccgcgtgagtgatgaaggtcttcggatcgtaaaactctgttattagggaagatgacggtacctaatcagaaagccacggctaactacgtgccagcagccgcggtaatacgtaggtggcaagcgttatccggaattattgggcgtaaagcgcgcgtaggcggtttcttaagtctgatgtgaaagcccacggctcaaccgtggagggtcattggaaactgggaaacttgagtgcagaagaggaaagtggaattccatgtgtagcggtgaaatgcgcagagatatggaggaacaccagtggcgaaggcgactttctggtctgactgacgctgatgtgcgaaagcgtggggatcaaacaggattagataccctggtagtccacgccgtaaacgatgagtgctaagtgttagggccttagtgctgcagctaacgcattaagcactccgcctggggagtacgaccgcaaggttgaaactcaaaggaattgacggggacccgcacaagcggtggagcatgtggtttaattcgaagcaacgcgaagaaccttaccaaatcttgacatcgacaggtggtgcatggttgtcgtcagctcgtgtcgtgagatgttgggttaagtcccgcaacgagcgcaacccttaaacttagttgccagcatgggcactctaagttgactgccggtgacaaaccggaggaaggtggggatgacgtcaaatcatcatgccccttatgatttgggctacacacgtgctacaatggacaacaaagggcagctaaaccgcgaggtcatgcaaatcccatttgttctcagttcggatgtagtctgcaactcgactacagaagctggaatcgctagtaatcgtagatcagcatgctacggtgaatacgttcccgggtcttgtacacaccgcccgtcacaccacgagagtttgtaacacccgaagccggtgagtag

SEQ ID NO: 1763 - DNA, 1545 bp, Staphylococcus condimenti
  modified_base (11)..(12): a, c, t, g, unknown or other
agagtttgatnntggctcaggatgaacgctggcggcgtgcctaatacatgcaagtcgagcgaacagatgaggagcttgctcctctgacgttagcggcggacgggtgagtaacacgtgggtaacctacctataagactggaataactccgggaaaccggggctaatgccggataatatgcggaaccgcatggttctgcaatgaaagacggttttgctgtcacttatagatggacccgcgccgtattagctagttggtaaggtaacggcttaccaaggcaacgatacgtagccgacctgagagggtgatcggccacactggaactgagacacggtccagactcctacgggaggcagcagtagggaatcttccgcaatgggcgaaagcctgacggagcaacgccgcgtgagtgatgaaggtcttcggatcgtaaaactctgttattagggaagaacaagtgcgtaggtaactatgcgcaccttgacggtacctaatcagaaagccacggctaactacgtgccagcagccgcggtaatacgtaggtggcaagcgttatccggaattattgggcgtaaagcgcgcgtaggcggttttttaagtctgatgtgaaagcccacggctcaaccgtggagggtcattggaaactggaaaacttgagtgcagaagaggaaagtggaattccatgtgtagcggtgaaatgcgcagagatatggaggaacaccagtggcgaaggcgactttctggtctgcaactgacgctgatgtgcgaaagcgtggggatcaaacaggattagataccctggtagtccacgccgtaaacgatgagtgctaagtgttagggggtttccgccccttagtgctgcagctaacgcattaagcactccgcctggggagtacggccgcaaggctgaaactcaaaggaattgacggggacccgcacaagcggtggagcatgtggtttaattcgaagcaacgcgaagaaccttaccaaatcttgacatcctttgaccgctctagagatagagtcttccccttcgggggacaaagtgacaggtggtgcatggttgtcgtcagctcgtgtcgtgagatgttgggttaagtcccgcaacgagcgcaacccttaagcttagttgccagcattaagttgggcactctaagttgactgccggtgacaaaccggaggaaggtggggatgacgtcaaatcatcatgccccttatgatttgggctacacacgtgctacaatggacagtacaaagggcagcgaaaccgcgaggtcaagcaaatcccataaagctgttctcagttcggattgtagtctgcaactcgactacatgaagctggaatcgctagtaatcgtagatcagcatgctacggtgaatacgttcccgggtcttgtacacaccgcccgtcacaccacgagagttcgtaacacccgaagccggtggagtaaccttttaggagctagccgtcgaaggtgggacgaatgattggggtgaagtcgtaacaaggtagccgtatcggaaggtgcggctggatcacctccttt

SEQ ID NO: 1764 - DNA, 1395 bp, Staphylococcus epidermidis
tcgagcgaacagacgaggagcttgctcctctgacgttagcggcggacgggtgagtaacacgtggataacctacctataagactgggataacttcgggaaaccggagctaataccggataatatattgaaccgcatggttcaatagtgaaagacggttttgctgtcacttatagatggatccgcgccgcattagctagttggtaaggtaacggcttaccaaggcaacgatgcgtagccgacctgagagggtgatcggccacactggaactgagacacggtccagactcctacgggaggcagcagtagggaatcttccgcaatgggcgaaagcctgacggagcaacgccgcgtgagtgatgaaggtcttcggatcgtaaaactctgttattagggaagaacaaatgtgtaagtaactatgcacgtcttgacggtacctaatcagaaagccacggctaactacgtgccagcagccgcggtaatacgtaggtggcaagcgttatccggaattattgggcgtaaagcgcgcgtaggcggttttttaagtctgatgtgaaagcccacggctcaaccgtggagggtcattggaaactggaaaacttgagtgcagaagaggaaagtggaattccatgtgtagcggtgaaatgcgcagagatatggaggaacaccagtggcgaaggcgactttctggtctgtaactgacgctgatgtgcgaaagcgtggggatcaaacaggattagataccctggtagtccacgccgtaaacgatgagtgctaagtgttagggggtttccgccccttagtgctgcagctaacgcattaagcactccgcctggggagtacgaccgcaaggttgaaactcaaaggaattgacggggacccgcacaagcggtggagcatgtggtttaattcgaagcaacgcgaagaagcttaccaaatcttgacatcctctgacccctctagagatagagttttccccttcgggggacagagtgacaggtggtgcatggttgtcgtcagctcgtgtcgtgagatgttgggttaagtcccgcaacgagcgcaacccttaagcttagttgccatcattaagttgggcactctaagttgactgccggtgacaaaccggaggaaggtggggatgacgtcaaatcatcatgccccttatgatttgggctacacacgtgctacaatggacaatacaaagggcagcgaaaccgcgaggtcaagcaaatcccataaagttgttctcagttcggattgtagtctgcaactcgactatatgaagctggaatcgctagtaatcgtagatcagcatgctacggtgaatacgttcccgggtcttgtacacaccgcccgtcacaccacgagagtttgtaacacccgaagccggtggagtaa

SEQ ID NO: 1765 - DNA, 1494 bp, Staphylococcus equorum
agagtttgatcctggctcaggatgaacgctggcggcgtgcctaatacatgcaagtcgagcgaacggataaggagcttgctcctttgaagttagcggcggacgggtgagtaacacgtgggtaacctacctataagactggaataacttcgggaaaccggagctaatgccggataacatttggaaccgcatggttctaaagtaaaagatggttttgctatcacttatagatggacccgcgccgtattagctagttggtaaggtaacggcttaccaaggcaacgatacgtagccgacctgagagggtgatcggccacactggaactgagacacggtccagactcctacgggaggcagcagtagggaatcttccgcaatggacgaaagtctgacggagcaacgccgcgtgagtgatgaaggttttcggatcgtaaaactctgttattagggaagaacaaatgtgtaagtaactgtgcacatcttgacggtacctaatcagaaagccacggctaactacgtgccagcagccgcggtaatacgtaggtggcaagcgttatccggaattattgggcgtaaagcgcgcgtaggcggtttcttaagtctgatgtgaaagcccacggctcaaccgtggagggtcattggaaactgggaaacttgagtacagaagaggaaagtggaattccatgtgtagcggtgaaatgcgcagagatatggaggaacaccagtggcgaaggcgactttctggtctgtaactgacgctgatgtgcgaaagcgtggggatcaaacaggattagataccctggtagtccacgccgtaaacgatgagtgctaagtgttagggggtttccgccccttagtgctgcagctaacgcattaagcactccgcctggggagtacgaccgcaaggttgaaactcaaaggaattgacggggacccgcacaagcggtggagcatgtggtttaattcgaagcaacgcgaagaaccttaccaaatcttgacatcctttgaaaactctagagatagagccttccccttcgggggacaaagtgacaggtggtgcatggttgtcgtcagctcgtgtcgtgagatgttgggttaagtcccgcaacgagcgcaacccttaaacttagttgccagcatttagttgggcactctaggttgactgccggtgacaaaccggaggaaggtggggatgacgtcaaatcatcatgccccttatgatttgggctacacacgtgctacaatggacaatacaaagggcagctaaaccgcgaggtcatgcaaatcccataaagttgttctcagttcggattgtagtctgcaactcgactacatgaagctggaatcgctagtaatcgtagatcagcatgctacggtgaatacgttcccgggtcttgtacacaccgcccgtcacaccacgagagtttgtaacacccgaagccggtggagtaaccatttatggagctagccgtcgaaggtgggacaaatgattggggt

SEQ ID NO: 1766 - DNA, 1454 bp, Staphylococcus fleurettii
agctggcggcgtgcctaatacatgcaagtcgagcgaacagatgagaagcttgcttctctgatgttagcggcggacgggtgagtaacacgtgggtaacctacctataagactgggataactccgggaaaccggggctaatacctgataatattttgaaccgcatggttcgatagtgaaaggcggcttcggctgtcacttatagatggacccgcgccgtattagctagttggtaaggtaatggcttaccaaggcgacgatacgtagccgacctgagagggtgatcggccacactggaactgagacacggtccagactcctacgggaggcagcagtagggaatcttccgcaatgggcgaaagcctgacggagcaacgccgcgtgagtgatgaaggttttcggatcgtaaaactctgttgttagggaagaacaaatttgttagtaactgaacaagtcttgacggtacctaaccagaaagccacggctaactacgtgccagcagccgcggtaatacgtaggtggcaagcgttatccggaattattgggcgtaaagcgcgcgtaggcggtttcttaagtctgatgtgaaagcccacggctcaaccgtggagggtcattggaaactggggaacttgagtgcagaagaggagagtggaattccatgtgtagcggtgaaatgcgcagagatatggaggaacaccagtggcgaaggcggctctctggtctgtaactgacgctgatgtgcgaaagcgtggggatcaaacaggattagataccctggtagtccacgccgtaaacgatgagtgctaagtgttagggggtttccgccccttagtgctgcagctaacgcattaagcactccgcctggggagtacgaccgcaaggttgaaactcaaaggaattgacggggacccgcacaagcggtggagcatgtggtttaattcgaagcaacgcgaagaaccttaccaaatcttgacatcctttgatcgctctagagatagagtcttccccttcgggggacaaagtgacaggtggtgcatggttgtcgtcagctcgtgtcgtgagatgttgggttaagtcccgcaacgagcgcaacccttaagcttagttgccatcattaagttgggcactctaggttgactgccggtgacaaaccggaggaaggtggggatgacgtcaaatcatcatgccccttatgatttgggctacacacgtgctacaatggataatacaaagggcagcgaacccgcgaggtcaagcaaatcccataaaattattctcagttcggattgtagtctgcaactcgactacatgaagctggaatcgctagtaatcgtagatcagcatgctacggtgaatacgttcccgggtcttgtgaacaccgcccgtcacaccacgagagtctgtaacacccgaaagccggtggagtaaccttttattaggagctagccgtcgaaggt

SEQ ID NO: 1767 - DNA, 1549 bp, Staphylococcus haemolyticus
tggagagtttgatcctggctcaggatgaacgctggcggcgtgcctaatacatgcaagtcgagcgaacagacaaggagcttgctcctttgacgttagcggcggacgggtgagtgacacgtgggtaacctacctataagactgggataacttcgggaaaccggagctaataccggataatatttcgaaccgcatggttcgatagtgaaagatggttttgctatcacttatagatggacccgcgccgtattagctagttggtaaggtaacggcttaccaaggcgacgatacgtagccgacctgagagggtgatcggccacactggaactgagacacggtccagactcctacgggaggcagcagtagggaatcttccgcaatgggcgaaagcctgacggagcaacgccgcgtgagtgatgaaggtcttcggatcgtaaaactctgttattagggaagaacatacgtgtaagtaactatgcacgtcttgacggtacctaatcagaaagccacggctaactacgtgccagcagccgcggtaatacgtaggtggcaagcgttatccggaattattgggcgtaaagcgcgcgtaggcggttttttaagtctgatgtgaaagcccacggctcaaccgtggagggtcattggaaactggaaaacttgagtgcagaagaggaaagtggaattccatgtgtagcggtgaaatgcgcagagatatggaggaacaccagtggcgaaggcgactttctggtctgtaactgacgctgatgtgcgaaagcgtggggatcaaacaggattagataccctggtagtccacgccgtaaacgatgagtgctaagtgttagggggtttccgccccttagtgctgcagctaacgcattaagcactccgcctggggagtacgaccgcaaggttgaaactcaaaggaattgacggggacccgcacaagcggtggagcatgtggtttaattcgaagcaacgcgaagaaccttaccaaatcttgacatcctttgacaactctagagatagagccttccccttcgggggacaaagtgacaggtggtgcatggttgtcgtcagctcgtgtcgtgagatgttgggttaagtcccgcaacgagcgcaacccttaagtttagttgccatcattaagttgggcactctaagttgactgccggtgacaaaccggaggaaggtggggatgacgtcaaatcatcatgccccttatgatttgggctacacacgtgctacaatggacaatacaaagggcagcgaaatcgcgaggtcaagcaaatcccataaagttgttctcagttcggattgtagtctgcaactcgactacatgaagctggaatcgctagtaatcgtagatcagcatgctacggtgaatacgttcccgggtcttgtacacaccgcccgtcacaccacgagagtttgtaacacccgaagccggtggagtaaccatttggagctagccgtcgaaggtgggacaaatgattggggtgaagtcgtaacaaggtagccgtatcggaaggtgcggctggatcacctcctttct

SEQ ID NO: 1768 - DNA, 1575 bp, Staphylococcus hominis
  modified_base (1)..(1): a, c, t, g, unknown or other
ncgvtccagctccggccgccatggcggccgcgggaaattcgattagagtttgattatggctcaggatggacgctggcggcgtgcctaatacatgcaagtcgagcgaacagacgaggagcttgctccttcgacgttagcggcggacgggtgagtaacacgtaggtaacctacctataagactgggataacttcgggaaaccggagctaataccggataatatttcgaaccgcatggttcgatagtgaaagatggctttgctatcacttatagatggacctgcgccgtattagctagttggtaaggtaacggcttaccaaggcaacgatacgtagccgacctgagagggtgatcggccacactggaactgagacacggtccagactcctacgggaggcagcagtagggaatcttccgcaatgggcgaaagcctgacggagcaacgccgcgtgagtgatgaaggtcttcggatcgtaaaactctgttattagggaagaacaaacgtgtaagtaactgtgcacgtcttgacggtacctaatcagaaagccacggctaactacgtgccagcagccgcggtaatacgtaggtggcaagcgttatccggaattattgggcgtaaagcgcgcgtaggcggttttttaagtctgatgtgaaagcccacggctcaaccgtggagggtcattggaaactggaaaacttgagtgcagaagaggaaagtggaattccatgtgtagcggtgaaatgcgcagagatatggaggaacaccagtggcgaaggcgactttctggtctgtaactgacgctgatgtgcgaaagcgtggggatcaaacaggattagataccctggtagtccacgccgtaaacgatgagtgctaagtgttagggggtttccgccccttagtgctgcagctaacgcattaagcactccgcctggggagtacgaccgcaaggttgaaactcaaaggaattgacggggacccgcacaagcggtggagcatgtggtttaattcgaagcaacgcgaagaaccttaccaaatcttgacatcctttgacccttctagagatagaagtttccccttcgggggacaaagtgacaggtggtgcatggttgtcgtcagctcgtgtcgtgagatgttgggttaagtcccgcaacgagcgcaacccttaagcttagttgccatcattaagttgggcactctaagttgactgccggtgacaaaccggaggaaggtggggatgacgtcaaaccatcatgccccttatgatttgggctacacacgtgctacaatggacaatacaaagggcagcgaaaccgcgaggtcaagcaaatcccataaagttgttctcagttcggattgtagtctgcaactcgactacatgaagctggaatcgctagtaatcgtagatcagcatgctacggtgaatacgttcccgggtcttgtacacaccgcccgtcacaccacgagagtttgtaacacccgaagccggtggagtaaccatttggagctagccgtcgaaggtgggacaaatgattggggtgaagtcgtaacaaggtaaccgtaaatcactagtgaattc

SEQ ID NO: 1769 - DNA, 970 bp, Staphylococcus lugdunensis
tcgagcgaacagatgaggagcttgctcctttgacgttagcggcggacgggtgagtaacacgtgggtaacctacctataagactgggacaacttcgggaaaccggagctaataccggataatatgttgaaccgcatggttcaatagtgaaagatggttttgctatcacttatagatggatccgcgccgtattagctagttggtgaggtaacggctcaccaaggcaacgatacgtagccgacctgagagggtgatcggccacactggaactgagacacggtccagactcctacgggaggcagcagtagggaatcttccgcaatgggcgaaagcctgacggagcaacgccgcgtgagtgatgaaggtcttaggatcgtaaaactctgttattagggaagaacaaacgtgtaagtaactgtgcacgtcttgacggtacctaatcagaaagccacggctaactacgtgccagcagccgcggtaatacgtaggtggcaagcgttatccggaattattgggcgtaaagcgcgcgtaggcggttttttaagtctgatgtgaaagcccacggctcaaccgtggagggtcattggaaactggaaaacttgagtgcagaagaggaaagtggaattccatgtgtagcggtgaaatgcgcagagatatggaggaacaccagtggcgaaggcgactttctggtctgtaactgacgctgatgtgcgaaagcgtggggatcaaacaggattagataccctggtagtccacgccgtaaacgatgagtgctaagtgttagggggtttccgccccttagtgctgcagctaacgcattaagcactccgcctggggagtacgaccgcaaggttgaaactcaaaggaattgacggggacccgcacaagcggtggagcatgtggtttaattcgaagcaacgcgaagaaccttaccaatcttgacatcctttgaccgctctagagatagagtct

SEQ ID NO: 1770 - DNA, 1520 bp, Staphylococcus pasteuri
ggagagtttgatcctggctcaggatgaacgctggcggcgtgcctaatacatgcaagtcgagcgaacagataaggagcttgctcctttgacgttagcggcggacgggtgagtaacacgtggataacctacctataagactgggataacttcgggaaaccggagctaataccggataacatattgaaccgcatggttcaatagtgaaaggcggctttgctgtcacttatagatggatccgcgccgtattagctagttggtaaggtaacggcttaccaaggcaacgatacgtagccgacctgagagggtgatcggccacactggaactgagacacggtccagactcctacgggaggcagcagtagggaatcttccgcaatgggcgaaagcctgacggagcagcgccgcgtgagtgatgaaggtcttcggatcgtaaaactctgttatcagggaagaacaaatgtgtaagtaactgtgcacatcttgacggtacctgatcagaaagccacggctaacaacgtgccagcagccgcggtaatacgtaggtggcaagcgttatccggaattattgggcgtaaaagcgcgcgtaggcggttttttaagtctgatgtgaaagcccacggctcaaccgtggagggtcattggaaactggaaaacttgagtgcagaagaggaaagtggaattccatgtgtagcggtgaaatgcgcagagatatggaggaacaccagtggcgaaggcgactttctggtctgtaactgacgctgatgtgcgaaagcgtggggatcaaacaggattagataccctggtagtccacgccgtaaacgatgagtgctaagtgttagggggtttccgccccttagtgctgcagctaacgcattaagcacgccgcctggggagtacgaccgcaaggttgaaactcaaaggaattgacggggacccgcacaagcggtggagcatgtggtttaattcgaagcaacgcgaagaaccttaccaaatcttgacatcctttgaccgctctagagatagagtcttccccttcgggggacaaagtgacaggtggtgcatggttgtcgtcagctcgtgtcgtgagatgttgggttaagtcccgcaacgagcgcaacccttaagcttagttgccatcattaagttgggcactctaagttgactgccggtgacaaaccggaggaaggtggggatgacgtcaaatcatcatgccccttatgatttgggctacacacgtgctacaatggacaatacaaagggcagctaaaccgcgaggtcaagcaaatcccataaagttgttctcagttcggattgtagtctgcaactcgactacatgaagctggaatcgctagtaatcgtagaacagcatgctacggtgaatacgttcccgggtcttgtacacaccgcccgtcacaccacgagagtttgtaacacccgaagccggtggagtaaccatttatggagctagccgtcgaaggtgggacaaatgattggggtgaagtcgtaacaaggtagccgta

SEQ ID NO: 1771 - DNA, 1555 bp, Staphylococcus pseudintermedius
ttttatggagagtttgatcctggctcaggatgaacgctggcggcgtgcctaatacatgcaagtcgagcgaacagataaggagcttgctcctttgacgttagcggcggacgggtgagtaacacgtgggtaacctacctataagactggaataactccgggaaaccggggctaatgccggataacatgttgaaccgcatggttctacagtgaaagacggtcttgctgtcacttatagatggacccgcgccgtattagctagttggtggggtaacggcctaccaaggcgacgatacgtagccgacctgagagggtgatcggccacactggaactgagacacggtccagactcctacgggaggcagcagtagggaatcttccgcaatgggcgaaagcctgacggagcaacgccgcgtgagtgatgaaggtcttcggatcgtaaagctctgttgttagggaagaacaaatgtgtaagtaactgtgcacatcttgacggtacctaaccagaaagccacggctaactacgtgccagcagccgcggtaatacgtaggtggcaagcgttatccggaattattgggcgtaaagcgcgcgtaggcggttttttaagtctgatgtgaaagcccacggctcaaccgtggagggtcattggaaactggaaaacttgagtgcagaagaggaaagtggaattccatgtgtagcggtgaaatgcgcagagatatggaggaacaccagtggcgaaggcggctttctggtctgcaactgacgctgatgtgcgaaagcgtggggatcaaacaggattagataccctggtagtccacgccgtaaacgatgagtgctaagtgttagggggtttccgccccttagtgctgcagctaacgcattaagcactccgcctggggagtacggtcgcaagactgaaactcaaaggaattgacggggacccgcacaagcggtggagcatgtggtttaattcgaagcaacgcgaagaaccttaccaaatcttgacatcctttgaccgctctagagatagagttttcctcttcggaggacaaagtgacaggtggtgcatggttgtcgtcagctcgtgtcgtgagatgttgggttaagtcccgcaacgagcgcaacccttgagcttagttgccatcattcagttgggcactctaagttgactgccggtgacaaaccggaggaaggtggggatgacgtcaaatcatcatgccccttatgatttgggctacacacgtgctacaatggacaatacaaagggcagcgaaaccgcgaggtcaagcaaatcccataaagttgttctcagttcggattgtagtctgcaactcgactacatgaagctggaatcgctagtaatcgtagatcagcatgctacggtgaatacgttcccgggtcttgtacacaccgcccgtcacaccacgagagtttgtaacacccgaagccggtggagtaaccattttggagctagccgtcgaaggtgggacaaatgattggggtgaagtcgtaacaaggtagccgtatcggaaggtgcggctggatcacctcctttct

SEQ ID NO: 1772 - DNA, 1527 bp, Staphylococcus saccharolyticus
  modified_base (22)..(22): a, c, t, g, unknown or other
  modified_base (1505)..(1505): a, c, t, g, unknown or other
ctggctcaggatgtaygctggnggcgtgcctaatacatgcaagtcgagcgaacagacgaggagcttgctcctctgacgttagcggcggacgggtgagtaacacgtggataacctacctataagactgggataacttcgggaaaccggagctaataccagataacatgttgaaccgcatggttcaacagtgaaagacggtcttgctgtcacttatagatggatccgcgccgcattagctagttggtaaggtaacggcttaccaaggcaacgatgcgtagccgacctgagagggtgatcggccacactggaactgagacacggtccagactcctacgggaggcagcagtagggaatcttccgcaatgggcgaaagcctgacggagcaacgccgcgtgagtgatgaaggtcttcggatcgtaaaactctgttattagggaagaacaaatgtgtaagtaactatgcacgtcttgacggcacctaatcagaaagccacggctaactacgtgccagcagccgcggtaatacgtaggtggcaagcgttatccggaattattgggcgtaaagcgcgcgtaggcggttttttaagtctgatgtgaaagcccacggctcaaccgtggagggtcattggaaactggaaaacttgagtgcagaagaggaaagtggaattccatgtgtagcggtgaaatgcgcagagatatggaggaacaccagtggcgaaggcgactttctggtctgtaactgacgctgatgtgcgaaagcgtggggatcaaacaggattagataccctggtagtccacgccgtaaacgatgagtgctaagtgttagggggtttccgccccttagtgctgcagctaacgcattaagcactccgcctggggagtacgaccgcaaggttgaaactcaaaggaattgacggggacccgcacaagcggtggagcatgtggtttaattcgaagcaacgcgaagaaccttaccaaatcttgacatcctctgacccctctagagatagagttttccccttcgggggacagagtgacaggtggtgcatggttgtcgtcagctcgtgtcgtgagatgttgggttaagtcccgcaacgagcgcaacccttaagcttagttgccatcattaagttgggcactctaagttgactgccggtgacaaaccggaggaaggtggggatgacgtcaaatcatcatgccccttatgatttgggctacacacgtgctacaatggacaatacaaagggcagcgaaaccgcgaggtcaagcaaaccccataaagttgttctcagttcggattgtagtctgcaactcgactatatgaagctggaatcgctagtaatcgtagatcagcatgctacggtgaatacgttcccgggtcttgtacacaccgcccgtcacaccacgagagtttgtaacacccgaagccggtggagtaacctkttggagctagccgtcgaaggtgggacaaatgattggggtgaagtcgtaacaaggtaagtcgtnacaaggtaagtcgccacaaggt

SEQ ID NO: 1773 - DNA, 1551 bp, Staphylococcus saprophyticus
tggagagtttgatcctggctcaggatgaacgctggcggcgtgcctaatacatgcaagtcgagcgaacagataaggagcttgctcctttgacgttagcggcggacgggtgagtaacacgtgggtaacctacctataagactgggataacttcgggaaaccggagctaataccggataacatttggaaccgcatggttctaaagtgaaagatggttttgctatcacttatagatggacccgcgccgtattagctagttggtaaggtaacggcttaccaaggcgacgatacgtagccgacctgagagggtgatcggccacactggaactgagacacggtccagactcctacgggaggcagcagtagggaatcttccgcaatgggcgaaagcctgacggagcaacgccgcgtgagtgatgaagggtttcggctcgtaaaactctgttattagggaagaacaaacgtgtaagtaactgtgcacgtcttgacggtacctaatcagaaagccacggctaactacgtgccagcagccgcggtaatacgtaggtggcaagcgttatccggaattattgggcgtaaagcgcgcgtaggcggtttcttaagtctgatgtgaaagcccacggctcaaccgtggagggtcattggaaactgggaaacttgagtgcagaagaggaaagtggaattccatgtgtagcggtgaaatgcgcagagatatggaggaacaccagtggcgaaggcgactttctggtctgtaactgacgctgatgtgcgaaagcgtggggatcaaacaggattagataccctggtagtccacgccgtaaacgatgagtgctaagtgttagggggtttccgccccttagtgctgcagctaacgcattaagcactccgcctggggagtacgaccgcaaggttgaaactcaaaggaattgacggggacccgcacaagcggtggagcatgtggtttaattcgaagcaacgcgaagaaccttaccaaatcttgacatcctttgaaaactctagagatagagccttccccttcgggggacaaagtgacaggtggtgcatggttgtcgtcagctcgtgtcgtgagatgttgggttaagtcccgcaacgagcgcaacccttaagcttagttgccatcattaagttgggcactctaggttgactgccggtgacaaaccggaggaaggtggggatgacgtcaaatcatcatgccccttatgatttgggctacacacgtgctacaatggacaatacaaagggcagctaaaccgcgaggtcatgcaaatcccataaagttgttctcagttcggattgtagtctgcaactcgactacatgaagctggaatcgctagtaatcgtagatcagcatgctacggtgaatacgttcccgggtcttgtacacaccgcccgtcacaccacgagagtttgtaacacccgaagccggtggagtaaccatttatggagctagccgtcgaaggtgggacaaatgattggggtgaagtcgtaacaaggtagccgtatcggaaggtgcggctggatcacctcctttct

SEQ ID NO: 1774 - DNA, 1528 bp, Staphylococcus sciuri
gatgaacgctggcggcgtgcctaatacatgcaagtcgagcgaacagatgagaagcttgcttctctgatgttagcggcggacgggtgagtaacacgtgggtaacctacctataagactgggataactccgggaaaccggggctaataccggataatattttgaaccgcatggttcaatagtgaaagacggtttcggctgtcacttatagatggacccgcgccgtattagctagttggtaaggtaacggcttaccaaggcgacgatacgtagccgacctgagagggtgatcggccacactggaactgagacacggtccagactcctacgggaggcagcagtagggaatcttccgcaatgggcgaaagcctgacggagcaacgccgcgtgagtgatgaaggtcttcggatcgtaaaactctgttgttagggaagaacaaatttgttagtaactgaacaagtcttgacggtacctaaccagaaagccacggctaactacgtgccagcagccgcggtaatacgtaggtggcaagcgttatccggaattattgggcgtaaagcgcgcgtaggcggtttcttaagtctgatgtgaaagcccacggctcaaccgtggagggtcattggaaactgggaaacttgagtgcagaagaggagagtggaattccatgtgtagcggtgaaatgcgcagagatatggaggaacaccagtggcgaaggcggctctctggtctgtaactgacgctgatgtgcgaaagcgtggggatcaaacaggattagataccctggtagtccacgccgtaaacgatgagtgctaagtgttagggggtttccgccccttagtgctgcagctaacgcattaagcactccgcctggggagtacgaccgcaaggttgaaactcaaaggaattgacggggacccgcacaagcggtggagcatgtggtttaattcgaagcaacgcgaagaaccttaccaaatcttgacatcctttgaccgctctagagatagagtcttccccttcgggggacaaagtgacaggtggtgcatggttgtcgtcagctcgtgtcgtgagatgttgggttaagtcccgcaacgagcgcaacccttaagcttagttgccatcattaagttgggcactctaggttgactgccggtgacaaaccggaggaaggtggggatgacgtcaaatcatcatgccccttatgatttgggctacacacgtgctacaatggataatacaaagggcagcgaatccgcgaggccaagcaaatcccataaaattattctcagttcggattgtagtctgcaactcgactacatgaagctggaatcgctagtaatcgtagatcagcatgctacggtgaatacgttcccgggtcttgtacacaccgcccgtcacaccacgagagtttgtaacacccgaagccggtggagtaaccttttaggagctagccgtcgaaggtgggacaaatgattggggtgaagtcgtaacaaggtagccgtatcggaaggtgcggctggatcacctcctttct

SEQ ID NO: 1775 - DNA, 1364 bp, Staphylococcus sp.
  H292
gagtttgatcctggctcaggatgaacgctggcggcgtgcctaatacatgcaagtcgagcgagcggcggacgggtgagtaacacgtaggtaacctacctataagactgggataacttcgggaaaccggagctaataccggataatgaaagtcacttatagatggacctgcgccgtattagctagttggtaaggtaacggcttaccaaggcaacgatacgtagccgacctgagagggtgatcggccacactggaactgagacacggtccagactcctacgggaggcagcagtagggaatcttccgcaatgggcgaaagcctgacggagcaacgccgcgtgagtgatgaaggtcttcggatcgtaaaactctgttattagggaagatgacggtacctaatcagaaagccacggctaactacgtgccagcagccgcggtaatacgtaggtggcaagcgttatccggaattattgggcgtaaagcgcgcgtaggcggttttttaagtctgatgtgaaagcccacggctcaaccgtggagggtcattggaaactggaaaacttgagtgcagaagaggaaagtggaattccatgtgtagcggtgaaatgcgcagagatatggaggaacaccagtggcgaaggcgactttctggtctgactgacgctgatgtgcgaaagcgtggggatcaaacaggattagataccctggtagtccacgccgtaaacgatgagtgctaagtgttagggccttagtgctgcagctaacgcattaagcactccgcctggggagtacgaccgcaaggttgaaactcaaaggaattgacggggacccgcacaagcggtggagcatgtggtttaattcgaagcaacgcgaagaaccttaccaaatcttgacatcgacaggtggtgcatggttgtcgtcagctcgtgtcgtgagatgttgggttaagtcccgcaacgagcgcaacccttaagcttagttgccatcatgggcactctaagttgactgccggtgacaaaccggaggaaggtggggatgacgtcaaatcatcatgccccttatgatttgggctacacacgtgctacaatggacaacaaagggcagcgaaaccgcgaggtcaagcaaatcccatttgttctcagttcggatgtagtctgcaactcgactacagaagctggaatcgctagtaatcgtagatcagcatgctacggtgaatacgttcccgggtcttgtacacaccgcccgtcacaccacgagagtttgtaacacccgaagccggtgagtagctagccgtcgaaggtgggacaaatgattggggtgaagtcgtaacaaggtagccgtatcggaaggtgcggctggatcacctcctt

SEQ ID NO: 1776 - DNA, 1364 bp, Staphylococcus sp.
  H780
gagtttgatcctggctcaggatgaacgctggcggcgtgcctaatacatgcaagtcgagcgagcggcggacgggtgagtaacacgtggataacctacctataagactgggataacttcgggaaaccggagctaataccggataatgaaagtcacttatagatggatccgcgccgcattagctagttggtaaggtaacggcttaccaaggcaacgatgcgtagccgacctgagagggtgatcggccacactggaactgagacacggtccagactcctacgggaggcagcagtagggaatcttccgcaatgggcgaaagcctgacggagcaacgccgcgtgagtgatgaaggtcttcggatcgtaaaactctgttattagggaagatgacggtacctaatcagaaagccacggctaactacgtgccagcagccgcggtaatacgtaggtggcaagcgttatccggaattattgggcgtaaagcgcgcgtaggcggttttttaagtctgatgtgaaagcccacggctcaaccgtggagggtcattggaaactggaaaacttgagtgcagaagaggaaagtggaattccatgtgtagcggtgaaatgcgcagagatatggaggaacaccagtggcgaaggcgactttctggtctgactgacgctgatgtgcgaaagcgtggggatcaaacaggattagataccctggtagtccacgccgtaaacgatgagtgctaagtgttagggccttagtgctgcagctaacgcattaagcactccgcctggggagtacgaccgcaaggttgaaactcaaaggaattgacggggacccgcacaagcggtggagcatgtggtttaattcgaagcaacgcgaagaaccttaccaaatcttgacatcgacaggtggtgcatggttgtcgtcagctcgtgtcgtgagatgttgggttaagtcccgcaacgagcgcaacccttaagcttagttgccatcatgggcactctaagttgactgccggtgacaaaccggaggaaggtggggatgacgtcaaatcatcatgccccttatgatttgggctacacacgtgctacaatggacaacaaagggcagcgaaaccgcgaggtcaagcaaatcccatttgttctcagttcggatgtagtctgcaactcgactatagaagctggaatcgctagtaatcgtagatcagcatgctacggtgaatacgttcccgggtcttgtacacaccgcccgtcacaccacgagagtttgtaacacccgaagccggtgagtagctagccgtcgaaggtgggacaaatgattggggtgaagtcgtaacaaggtagccgtatcggaaggtgcggctggatcacctcctt

SEQ ID NO: 1777 - DNA, 1545 bp, Staphylococcus sp.
  clone bottae7
gagtttgatcctggctcaggatgaacgctggcggcgtgcctaatacatgcaagtcgagcgaacagataaggagcttgctcctttgacgttagcggcggacgggtgagtaacacgtgggtaacctacctataagactgggataactccgggaaaccggggctaataccggataatatttagaaccgcatggttctaaagtgaaagatggccttgctatcacttatagatggacccgcgccgtattagctagttggtaaggtaacggcttaccaaggcaacgatacgtagccgacctgagagggtgatcggccacactggaactgagacacggtccagactcctacgggaggcagcagtagggaatcttccgcaatgggcgaaagcctgacggagcaacgccgcgtgagtgatgaaggtcttcggatcgtaaaactctgttactagggaagaacaaatgcgtaagtaactgtgcgcgtcttgacggtacctaatcagaaagccacggctaactacgtgccagcagccgcggtaatacgtaggtggcaagcgttatccggaattattgggcgtaaagcgcgcgtaggcgggtttttaagtctgatgtgaaagcccacggctcaaccgtggagggtcattggaaactggaaaacttgagtgcagaagaggaaagtggaattccatgtgtagcggtgaaatgcgcagagatatggaggaacaccagtggcgaaggcgactttctggtctgtaactgacgctgatgtgcgaaagcgtggggatcaaacaggattagataccctggtagtccacgctgtaaacgatgagtgctaagtgttagggggtttccgccccttagtgctgcagctaacgcattaagcactccgcctggggagtacgaccgcaaggttgaaactcaaaggaattgacggggacccgcacaagcggtggagcatgtggtttaattcgaagcaacgcgaagaaccttaccaaatcttgacatcctttgaccacgctagagatagcgttttccccttcgggggacaaagtgacaggtggtgcatggttgtcgtcagctcgtgtcgtgagatgttgggttaagtcccgcaacgagcgcaacccttaagcttagttgccatcattaagttgggcactctaggttgactgccggtgacaaaccggaggaaggtggggatgacgtcaaatcatcatgccccttatgatttgggctacacacgtgctacaatggacaatacaaagggcagctaaaccgcgaggtcatgcaaatcccataaagttgttctcagttcggattgtagtctgcaactcgactacatgaagctggaatcgctagtaatcgtagatcagcatgctacggtgaatacgttcccgggtcttgtacacaccgcccgtcacaccacgagagtttgtaacacccgaagccggtggagtaaccttttggagctagccgtcgaaggtgggacaaatgattggggtgaagtcgtaacaaggtagccgtatcggaaggtgcggctggatcacctcctttct

SEQ ID NO: 1778 - DNA, 1548 bp, Staphylococcus succinus
tggagagtttgatcctggctcaggatgaacgctggcggcgtgcctaatacatgcaagtcgagcgaacggataaggagcttgctcctttgaagttagcggcggacgggtgagtaacacgtgggtaacctacctataagactggaataacttcgggaaaccggagctaatgccggataacatatagaaccgcatggttctatagtgaaagatggttttgctatcacttatagatggacccgcgccgtattagctagttggtaaggtaatggcttaccaaggcgacgatacgtagccgacctgagagggtgatcggccacactggaactgagacacggtccagactcctacgggaggcagcagtagggaatcttccgcaatgggcgaaagcctgacggagcaacgccgcgtgagtgatgaaggttttcggatcgtaaaactctgttattagggaagaacaaatgcgtaagtaactgtgcgcatcttgacggtacctaatcagaaagccacggctaactacgtgccagcagccgcggtaatacgtaggtggcaagcgttatccggaattattgggcgtaaagcgcgcgtaggcggtttcttaagtctgatgtgaaagcccacggctcaaccgtggagggtcattggaaactgggaaacttgagtgcagaagaggaaagtggaattccatgtgtagcggtgaaatgcgcagagatatggaggaacaccagtggcgaaggcgactttctggtctgtaactgacgctgatgtgcgaaagcgtggggatcaaacaggattagataccctggtagtccacgccgtaaacgatgagtgctaagtgttagggggtttccgccccttagtgctgcagctaacgcattaagcactccgcctggggagtacgaccgcaaggttgaaactcaaaggaattgacggggacccgcacaagcggtggagcatgtggtttaattcgaagcaacgcgaagaaccttaccaaatcttgacatcctttgaaaactctagagatagagccttccccttcgggggacaaagtgacaggtggtgcatggttgtcgtcagctcgtgtcgtgagatgttgggttaagtcccgcaacgagcgcaacccttaagcttagttgccatcattaagttgggcactctaggttgactgccggtgacaaaccggaggaaggtggggatgacgtcaaatcatcatgccccttatgatttgggctacacacgtgctacaatggacaatacaaagggcagctaaaccgcgaggtcatgcaaatcccataaagttgttctcagttcggattgtagtctgcaactcgactacatgaagctggaatcgctagtaatcgtagatcagcatgctacggtgaatacgttcccgggtcttgtacacaccgcccgtcacaccacgagagtttgtaacacccgaagccggtggagtaaccatttatggagctagccgtcgaaggtgggacaaatgattggggtgaagtcgtaacaaggtagccgtatcggaaggtgcggctggatcacctcctt

SEQ ID NO: 1779 - DNA, 1497 bp, Staphylococcus vitulinus
agagtttgatcctggctcaggacgaacgctggcggcgtgcctaatacatgcaagtcgagcgaacagatgagaagcttgcttctctgatgttagcggcggacgggtgagtaacacgtgggtaacctacctataagactgggataactccgggaaaccggggctaatacctgataatattttgaaccgcatggttcaatagtgaaagacggcttcggctgtcacttatagatggacccgcgccgtattagctagttggtaaggtaatggcttaccaaggcaacgatacgtagccgacctgagagggtgatcggccacactggaactgagacacggtccagactcctacgggaggcagcagtagggaatcttccgcaatgggcgaaagcctgacggagcaacgccgcgtgagtgatgaaggtcttaggatcgtaaaactctgttgttagggaagaacaaatttgttagtaactgaacaagtcttgacggtacctaaccagaaagccacggctaactacgtgccagcagccgcggtaatacgtaggtggcaagcgttatccggaattattgggcgtaaagcgcgcgtaggcggtttcttaagtctgatgtgaaagtccacggctcaaccgtggaaggtcattggaaactggggaacttgagtgcagaagaggagagtggaattccatgtgtagcggtgaaatgcgcagagatatggaggaacaccagtggcgaaggcggctctctggtctgtaactgacgctgatgtgcgaaagcgtggggatcaaacaggattagataccctggtagtccacgccgtaaacgatgagtgctaagtgttagggggtttccgccccttagtgctgcagctaacgcattaagcactccgcctggggagtacgaccgcaaggttgaaactcaaaggaattgacggggacccgcacaagcggtggagcatgtggtttaattcgaagcaacgcgaagaaccttaccaaatcttgacatcctttgatcgctctagagatagagttttccccttcgggggacaaagtgacaggtggtgcatggttgtcgtcagctcgtgtcgtgagatgttgggttaagtcccgcaacgagcgcaacccttaagcttagttgccatcattaagttgggcactctaggttgactgccggtgacaaaccggaggaaggtggggatgacgtcaaatcatcatgccccttatgatttgggctacacacgtgctacaatggataatacaaagggcagcgaaaccgcgaggtcaagcaaatcccataaaattattctcagttcggattgtagtctgcaactcgactacatgaagctggaatcgctagtaatcgtagatcagcatgctacggtgaatacgttcccgggtcttgtacacaccgcccgtcacaccacgagagtttgtaacacccgaagccggtggagtaaccttttattaggagctagccgtcgaaggtgggacagatgattggggt

SEQ ID NO: 1780 - DNA, 1403 bp, Staphylococcus warneri
cgaacagataaggagcttgctcctttgacgttagcggcggacgggtgagtaacacgtggataacctacctataagactgggataacttcgggaaaccggagctaataccggataacatattgaaccgcatggttcaatagtgaaaggcggctttgctgtcacttatagatggatccgcgccgtattagctagttggtaaggtaacggcttaccaaggcaacgatacgtagccgacctgagagggtgatcggccacactggaactgagacacggtccagactcctacgggaggcagcagtagggaatcttccgcaatgggcgaaagcctgacggagcaacgccgcgtgagtgatgaaggtcttcggatcgtaaaactctgttatcagggaagaacaaatgtgtaagtaactgtgcacatcttgacggtacctgatcagaaagccacggctaactacgtgccagcagccgcggtaatacgtaggtggcaagcgttatccggaattattgggcgtaaagcgcgcgtaggcggttttttaagtctgatgtgaaagcccacggctcaaccgtggagggtcattggaaactggaaaacttgagtgcagaagaggaaagtggaattccatgtgtagcggtgaaatgcgcagagatatggaggaacaccagtggcgaaggcgactttctggtctgtaactgacgctgatgtgcgaaagcgtggggatcaaacaggattagataccctggtagtccacgccgtaaacgatgagtgctaagtgttagggggtttccgccccttagtgctgcagctaacgcattaagcactccgcctggggagtacgaccgcaaggttgaaactcaaaggaattgacggggacccgcacaagcggggagcatgtggtttaattcgaagcaacgcgaagaaccttacgaaatcatgacgtcctttgacgtttctagagatagagtcgtctacatcgggggacaaagtgacaggtggtgcatggttgtcgtcagctcgtgtcgtgagatgttgggttaagtcccgcaacgagcgcaacccttaagcttagttgccatcattaagttgggcactctaagttgactgccggtgacaaaccggaggaaggtggggatgacgtcaaatcatcatgccccttatgatttgggctacacacgtgctacaatggacaatacaaagggcagctaaaccgcgaggtcaagcaaatcccataaagttgttctcagttcggattgtagtctgcaactcgactacatgaagctggaatcgctagtaatcgtagatcagcatgctacggtgaatacgttcccgggtcttgtacacaccgcccgtcacaccacgagagtttgtaacacccgaagccggtggagtaaccatttatggagct

SEQ ID NO: 1781 - DNA, 1487 bp, Staphylococcus xylosus
tggcggggtgcctaatacatgcaagtcgagcgaacagataaggagcttgctcctttgacgttagcggcggacgggtgagtaacacgtgggtaacctacctataagactgggataacttcgggaaaccggagctaataccggataacatttggaaccgcatggttctaaagtgaaagatggttttgctatcacttatagatggacccgcgccgtattagctagttggtaaggtaacggcttaccaaggcaacgatacgtagccgacctgagagggtgatcggccacactggaactgagacacggtccagactcctacgggaggcagcagtagggaatcttccgcaatgggcgaaagcctgacggagcaacgccgcgtgagtgatgaagggtttcggctcgtaaaactctgttattagggaagaacaaatgtgtaagtaactgtgcacatcttgacggtacctaatcagaaagccacggctaactacgtgccagcagccgcggtaatacgtaggtggcaagcgttatccggaattattgggcgtaaagcgcgcgtaggcggtttcttaagtctgatgtgaaagcccacggctcaaccgtggagggtcattggaaactgggaaacttgagtgcagaagaggaaagtggaattccatgtgtagcggtgaaatgcgcagagatatggaggaacaccagtggcgaaggcgactttctggtctgtaactgacgctgatgtgcgaaagcgtggggatcaaacaggattagataccctggtagtccacgccgtaaacgatgagtgctaagtgttaggtgggtttccgccccttagtgctgcagctaacgcattaagcactccgcctggggagtacgaccgcaaggttgaaactcaaaggaattgacggggacccgcacaagcggtggagcatgtggtttaattcgaagcaacgcgaagaaccttaccaaatcttgacatcctttgaaaactctagagatagagccttccccttcgggggacaaagtgacaggtggtgcatggttgtcgtcagctcgtgtcgtgagatgttgggttaagtcccgcaacgagcgcaacccttaagcttagttgccatcattaagttgggcactctaggttgactgccggtgacaaaccggaggaaggtggggatgacgtcaaatcatcatgccccttatgatttgggctacacaccgtgctacaatggacaatacaaagggcagctaaaccgcgaggtcatgcaaatcccataaagttgttctcagttcggattgtagtctgcaactcgactacatgaagctggaatcgctagtaatcgtagatcagcatgctacggtgaatacgttcccgggtcttgtacacaccgcccgtcacaccacgagagtttgtaacacccgaagccggtggagtaaccatttatggagctagccgtcgaaggtgggacaaatgattggggtgaagtcgtaacaagggaacc

SEQ ID NO: 1782 - DNA, 1547 bp, Stenotrophomonas maltophilia
taagtgaagagtttgatcctggctcagagtgaacgctggcggtaggcctaacacatgcaagtcgaacggcagcacagtaagagcttgctcttacgggtggcgagtggcggacgggtgaggaatacatcggaatctactttttcgtgggggataacgtagggaaacttacgctaataccgcatacgacctacgggtgaaagcaggggatcttcggaccttgcgcgattgaatgagccgatgtcggattagctagttggcggggtaaaggcccaccaaggcgacgatccgtagctggtctgagaggatgatcagccacactggaactgagacacggtccagactcctacgggaggcagcagtggggaatattggacaatgggcgcaagcctgatccagccataccgcgtgggtgaagaaggccttcgggttgtaaagcccttttgttgggaaagaaatccagctggttaatacccggttgggatgacggtacccaaagaataagcaccggctaacttcgtgccagcagccgcggtaatacgaagggtgcaagcgttactcggaattactgggcgtaaagcgtgcgtaggtggttgtttaagtctgttgtgaaagccctgggctcaacctgggaactgcagtggaaactggacgactagagtgtggtagagggtagcggaattcctggtgtagcagtgaaatgcgtagagatcaggaggaacatccatggcgaaggcagctacctggaccaacactgacactgaggcacgaaagcgtggggagcaaacaggattagataccctggtagtccacgccctaaacgatgcgaactggatgttgggtgcaatttggcacgcagtatcgaagctaacgcgttaagttcgccgcctggggagtacggtcgcaagactgaaactcaaaggaattgacgggggcccgcacaagcggtggagtatgtggtttaattcgatgcaacgcgaagaaccttacctggccttgacatgtcgagaactttccagagatggattggtgccttcgggaactcgaacacaggtgctgcatggctgtcgtcagctcgtgtcgtgagatgttgggttaagtcccgcaacgagcgcaacccttgtccttagttgccagcacgtaatggtgggaactctaaggagaccgccggtgacaaaccggaggaaggtggggatgacgtcaagtcatcatggcccttacggccagggctacacacgtactacaatggtagggacagagggctgcaagccggcgacggtaagccaatcccagaaaccctatctcagtccggattggagtctgcaactcgactccatgaagtcggaatcgctagtaatcgcagatcagcattgctgcggtgaatacgttcccgggccttgtacacaccgcccgtcacaccatgggagtttgttgcaccagaagcaggtagcttaaccttcgggagggcgcttgccacggtgtggccgatgactggggtgaagtcgtaacaaggtagccgtatcggaaggtgcggctggatcacctccttt

SEQ ID NO: 1783 - DNA, 1508 bp, Stenotrophomonas sp.
  FG-6
gtttgatcctggctcagagtgaacgctggcggtaggcctaacacatgcaagtcgaacggcagcacagtaagagcttgctcttacgggtggcgagtggcggacgggtgaggaatgcatcggaatctactctgtcgtgggggataacgtagggaagcttacgctaataccgcatacgacctacgggtgaaagcaggggatcttcggaccttgcgcgattgaatgagccgatgcccgattagctagttggcggggtaagagcccaccaaggcgacgatcggtagctggtctgagaggatgatcagccacactggaactgagacacggtccagactcctacgggaggcagcagtggggaatattggacaatgggcgcaagcctgatccagccataccgcgtgggtgaagaaggccttcgggttgtaaagcccttttgttgggaaagaaaagcagccggttaatacccggttgttctgacggtacccaaagaataagcaccggctaacttcgtgccagcagccgcggtaatacgaagggtgcaagcgttactcggaattactgggcgtaaagcgtgcgtaggtggttgtttaagtctgtcgtgaaagccctgggctcaacctgggaatggcgatggaaactgggcgactagagtgtggcagagggtagtggaattcctggtgtagcagtgaaatgcgtagagatcaggaggaacatccgtggcgaaggcgactgcctgggccaacactgacactgaggcacgaaagcgtggggagcaaacaggattagataccctggtagtccacgccctaaacgatgcgaactggatgttgggtgcaatttggcacgcagtatcgaagctaacgcgttaagttcgccgcctggggagtacggtcgcaagactgaaactcaaaggaattgacgggggcccgcacaagcggtggagtatgtggtttaattcgatgcaacgcgaagaaccttacctggccttgacatgcacggaactttccagagatggattggtgccttcgggaaccgtgacacaggtgctgcatggctgtcgtcagctcgtgtcgtgagatgttgggttaagtcccgcaacgagcgcaacccttgtccttagttgccagcacgtaatggtgggaactctaaggagaccgccggtgacaaaccggaggaaggtggggatgacgtcaagtcatcatggcccttacggccagggctacacacgtactacaatggtagggacagagggctgcaagccggcgacggtgagccaatcccagaaaccctatctcagtccggattggagtctgcaactcgactccatgaagtcggaatcgctagtaatcgcagatcagcattgctgcggtgaatacgttcccgggccttgtacacaccgcccgtcacaccatgggagtttgttgcaccagaagcaggtagcttaaccttcgggagggcgcttgccacggtgtggccgatgactggggtgaagtcgtaacaaggtagccgta

SEQ ID NO: 1784 - DNA, 1485 bp, Streptobacillus moniliformis
agagtttgatcctggctcaggatgaacgctgacagaatgcttaacacatgcaaatctatgtatgaaatgtaagcttgcttacatagactacatggtggactggtgagtaacgtgtaaagaacttacctcttagactgggataaccattaggaaatgatggataatactagatattattagtagtaggcatctactattaatgaaaggagagattgctaagagagagctttgcatcctattagctagttggtggggtaaaggcctaccaaggctatgataggtagccggcccgagaggtgaacggccacaaggggactgagatacggcccttactcctacgggaggcagcagtggggaatattggacaatggaggaaactctgatccagcaattctgtgtgcacgaagaaggttttcggattgtaaagtgctttcagtagggaagaagaagatgacggtacctacagaagaagcgacggctaaatacgtgccagcagccgcggtaatacgtatgtcgcaagcgttatccggaattattgggcttaaagggcatctaggcggtctaacaagttgaaggtgaaaagctgtggctcaaccatagtcttgcctacaaaactgtcagactagagtactggaaaggtgggtggaactacacgagtagaggtgaaattcgtagatatgtgtaggaatgccgatgatgaagataactcactggacagaaactgacgctgaagtgcgaaacgtaggggagcaaacaggattagataccctggtagtcctagctgtaaacgatgatcactgggtgtgggggtgtgaagcctctgtgccgaagcaaaagcgataagtgatccgcctggggagtacgtacgcaagtatgaaactcaaaggaattgacggggacccgcacaagtggtggagcatgtggtttaattcgacgcaacgcgaggaaccttaccaggtcttgacatactcggaataagatggaagcatcttagtgcctttgggaaccgagatacaggtggtgcatggctgtcgacagctcgtgtcgtgagatgttgggttaagtcccgcaacgagcgaaacccctatcattagttgccatcattaagttggggactctaatgaaactgcccgcgacgagcaggaggaaggtggggatgacgtcaagtcattctgccccttatgatctgggctacacacgtgctacaatgggtagtacaaagaggagctaagcagtgatgtggagcaaatctttcaaagctactctcagttcggattgaagtctgcaactcgacttcatgaagttggaatcactagtaatcgcaaatcagcaatgttgcggtgaatacgttctcgggtcttgtacacaccgcccgtcacaccacgagagttagttgcacctgaagttactggcctaacccgtaagggagggaagtacctaaggtgtgattagtgattggggtgaagtcgtaacaaggtagccgta

SEQ ID NO: 1785 - DNA, 1550 bp, Streptococcus agalactiae
tgagagtttgatcctggctcaggacgaacgctggcggcgtgcctaatacattgcaagtagaacgctgagggttttggtgtttacactagactgatgagttgcgaacgggtgagtaacgcgtaggtaacctgcctccatagcgggggataactattggaaacgatagctaataccgcataagagtaattaacacatgttagttatttaaaaggagcaattgcttcactgtgagatggacctgcgttgtattagctagttggtgaggtaaaggctcaccaaggcgacgatacatagccgacctgagagggtgatcggccacactgggactgagacacggcccagactcctacgggaggcagcagtagggaatcttcggcaatggacggaagtctgaccgagcaacgccgcgtgagtgaagaaggttttcggatcgtaaagctctgttgttagagaagaacgttggtaggagtggaaaatctaccaagtgacggtaactaaccagaaagggacggctaactacgtgccagcagccgcggtaatacgtaggtcccgagcgttgtccggatttattgggcgtaaagcgagcgcaggcggttctttaagtctgaagttaaaggcagtggcttaaccattgtacgctttggaaactggaggacttgagtgcagaaggggagagtggaattccatgtgtagcggtgaaatgcgtagatatatgagggaccaccggtggcgaaagcggctctctggtctgtaactgacgctgaggctcgaaagcgtggggagcaaacaggattagataccctggtagtccacgccgtaaacgatgagtgctaggtgttaggccctttccggggcttagtgccgcagctaacgcattaagcactccgcctggggagtacgaccgcaaggttgaaactcaaaggaattgacgggggcccgcacaagcggtggagcatgtggtttaattcgaagcaacgcgaagaaccttaccaggtcttgacatccttctgaccggcctagagataggctttctcttcggagcagaagtgacaggtggtgcatggttgtcgtcagctcgtgtcgtgagatgttgggttaagtcccgcaacgagcgcaacccctattgttagttgccatcattaagttgggcactctagcgagactgccggtaataaaccggaggaaggtggggatgacgtcaaatcatcatgccccttatgacctgggctacacacgtgctacaatggttggtacaacgagtcgcaagccggtgacggcaagctaatctcttaaagccaatctcagttcggattgtaggctgcaactcgcctacatgaagtcggaatcgctagtaatcgcggatcagcacgccgcggtgaatacgttcccgggccttgtacacaccgcccgtcacaccacgagagtttgtaacacccgaagtcggtgaggtaaccttttaggagccagccgcctaaggtgggatagatgattggggtgaagtcgtaacaaggtagccgtatcggaaggtgcggctggatcacctcctttct

SEQ ID NO: 1786 - DNA, 1437 bp, Streptococcus alactolyticus
atggctcaggacgaacgctggcggcgtgcctaatacatgcaagtagaacgctgaagaaaggagcttgcttcttttggatgagttgcgaacgggtgagtaacgcgtaggtaacctgccttgtagcgggggataactattggaaacgatagctaataccgcataacagcttttgacacatgttagaagcttgaaagatgcaattgcatcactacgagatggacctgcgttgtattagctagtaggtagggtaacggcctacctaggcgacgatacatagccgacctgagagggtgatcggccacactgggactgagacacggcccagactcctacgggaggcagcagtagggaatcttcggcaatgggggcaaccctgaccgagcaacgccgcgtgagtgaagaaggttttcggatcgtaaagctctgttgtaagagaagaacgtgtgtgagagtggaaagttcacacagtgacggtaacttaccagaaagggacggctaactacgtgccagcagccgcggtaatacgtaggtcccgagcgttgtccggatttattgggcgtaaagcgagcgcaggcggtttaataagtctgaagttaaaggcagtggcttaaccattgttcgctttggaaactgttaaacttgagtgcagaaggggagagtggaattccatgtgtagcggtgaaatgcgtagatatatggaggaacaccggtggcgaaagcggctctctggtctgtaactgacgctgaggctcgaaagcgtggggagcaaacaggattagataccctggtagtccacgccgtaaacgatgagtgctaggtgttaggccctttccggggcttagtgccgcagctaacgcattaagcactccgcctggggagtacgaccgcaaggttgaaactcaaaggaattgacgggggcccgcacaagcggtggagcatgtggtttaattcgaagcaacgcgaagaaccttaccaggtcttgacatcccagtgaccgctctagagatagagtttttcttcggaacactggtgacaggtggtgcatggttgtcgtcagctcgtgtcgtgagatgttgggttaagtcccgcaacgagcgcaacccttattgttagttgccatcattcagttgggcactctagcgagactgccggtaataaaccggaggaaggtggggatgacgtcaaatcatcatgccccttatgacctgggctacacacgtgctacaatggttggtacaacgagtcgcaagtcggtgacggcaagcaaatctcttaaagccaatctcagttcggattgtaggctgcaactcgcctacatgaagtcggaatcgctagtaatcgcggatcagcacgccgcggtgaatacgttcccgggccttgtacacaccgcccgtcacaccacgagagtttgtaacacccgaagtcggtgaggtaacc

SEQ ID NO: 1787 - DNA, 1553 bp, Streptococcus anginosus
tgagagtttgatcctggctcaggacgaacgctggcggcgtgcctaatacatgcaagtaggacgcacagtttataccgtagcttgctacaccatagactgtgagttgcgaacgggtgagtaacgcgtaggtaacctgcctattagagggggataactattggaaacgatagctaataccgcataacagtatgtaacacatgttagatgcttgaaagatgcaattgcatcgctagtagatggacctgcgttgtattagctagtaggtagggtaatggcctacctaggcgacgatacatagccgacctgagagggtgatcggccacactgggactgagacacggcccagactcctacgggaggcagcagtagggaatcttcggcaatggggggaaccctgaccgagcaacgccgcgtgagtgaagaaggttttcggatcgtaaagctctgttgttaaggaagaacgagtgtgaaaatggaaagttcatactgtgacggtacttaaccagaaagggacggctaactacgtgccagcagccgcggtaatacgtaggtcccgagcgttgtccggatttattgggcgtaaagcgagcgcaggcggttagaaaagtctgaagtgaaaggcagtggctcaaccattgtaggctttggaaactgtttaacttgagtgcagaaggggagagtggaattccatgtgtagcggtgaaatgcgtagatatatggaggaacaccggtggcgaaagcggctctctggtctgtaactgacgctgaggctcgaaagcgtggggagcgaacaggattagataccctggtagtccacgccgtaaacgatgagtgctaggtgttaggtcctttccgggacttagtgccgcagctaacgcattaagcactccgcctggggagtacgaccgcaaggttgaaactcaaaggaattgacgggggcccgcacaagcggtggagcatgtggtttaattcgaagcaacgcgaagaaccttaccaggtcttgacatcccgatgctatttctagagataggaagtttcttcggaacatcggtgacaggtggtgcatggttgtcgtcagctcgtgtcgtgagatgttgggttaagtcccgcaacgagcgcaacccttattgttagttgccatcattgagttgggcactctagcgagactgccggtaataaaccggaggaaggtggggatgacgtcaaatcatcatgccccttatgacctgggctacacacgtgctacaatggctggtacaacgagtcgcaagccggtgacggcaagctaatctctgaaagccagtctcagttcggattgtaggctgcaactcgcctacatgaagtcggaatcgctagtaatcgcggatcagcacgccgcggtgaatacgttcccgggccttgtacacaccgcccgtcacaccacgagagtttgtaacacccgaagtcggtgaggtaaccgtaaggagccagccgcctaaggtgggatagatgattggggtgaagtcgtaacaaggtagccgtatcggaaggggcggctggatcacctcctttct

SEQ ID NO: 1788 - DNA, 938 bp, Streptococcus australis
  modified_base (26)..(27): a, c, t, g, unknown or other
  modified_base (35)..(35): a, c, t, g, unknown or other
  modified_base (287)..(287): a, c, t, g, unknown or other
  modified_base (929)..(929): a, c, t, g, unknown or other
gccagcagccgcggtaatacgtaggnncgagcgtnatccggatttattgggcgtaaagcgagcgcaggcggttagataagtctgaagttaaaggctgtggcttaaccatagtacgctttggaaactgtttaacttgagtgcagaaggggagagtggaattccatgtgtagcggtgaaatgcgtagatatatggaggaacaccggtggcgaaagcggctctctggtctgtaactgacgctgaggctcgaaagcgtggggagcaaacaggattagataccctggtagtncacgccgtaaacgatgagtgctaggtgttgggtcctttccgggactcagtgccgcagctaacgcattaagcactccgcctggggagtacgaccgcaaggttgaaactcaaaggaattgacgggggcccgcacaagcggtggagcatgtggtttaattcgaagcaacgcgaagaaccttaccaggtcttgacatccctctgaccgctctagagatagagctttccttcgggacagaggtgacaggtggtgcatggttgtcgtcagctcgtgtcgtgagatgttgggttaagtcccgcaacgagcgcaacccctattgttagttgccatcatttagttgggcactctagcgagactgccggtaataaaccggaggaaggtggggatgacgtcaaatcatcatgccccttatgacctgggctacacacgtgctacaatggctggtacaacgagtcgcgagtcggtgacggcaagctaatctcttaaagccagtctcagttcggattgtaggctgcaactcgcctacatgaagtcggaatcgctagtaatcgcggatcagcacgccgcggtgaatacgttcccgggccttgtacacaccgcccgtcacaccacgagagtttgtaacacccgaagtcggtgaggtanccttttagg

SEQ ID NO: 1789 - DNA, 1546 bp, Streptococcus bovis
tgagagtttgatcctggctcaggacgaacgctggcggcgtgcctaatacatgcaagtagaacgctgactactttagcttgctagagtagaaggagttgcgaacgggtgagtaacgcgtaggtaacctgcctactagcgggggataactattggaaacgatagctaataccgcataacagtgtttaacacatgttagatgcttgaaagatgcaattgcatcactagtagatggacctgcgttgtattagctagttggtggggtaacggcccaccaaggcgacgatacatagccgacctgagagggtgatcggccacactgggactgagacacggcccagactcctacgggaggcagcagtagggaatcttcggcaatgggggcaaccctgaccgagcaacgccgcgtgagtgaagaaggttttcggatcgtaaagctctgttgtaagagaagaacgtgtgtgagagtggaaagttcacacagtgacggtaacttaccagaaagggacggctaactacgtgccagcagccgcggtaatacgtaggtcccgagcgttgtccggatttattgggcgtaaagcgagcgcaggcggtttaataagtctgaagttaaaggcagtggcttaaccattgttcgctttggaaactgttaaacttgagtgcagaaggggagagtggaattccatgtgtagcggtgaaatgcgtagatatatggaggaacaccggtggcgaaagcggctctctggtctgtaactgacgctgaggctcgaaagcgtggggagcaaacaggattagataccctggtagtccacgccgtaaacgatgagtgctaggtgttaggccctttccggggcttagtgccgcagctaacgcattaagcactccgcctggggagtacgaccgcaaggttgaaactcaaaggaattgacgggggcccgcacaagcggtggagcatgtggtttaattcgaagcaacgcgaagaaccttaccaggtcttgacatcccgatgctatttctagagatagaaagtttcttcggaacatcggtgacaggtggtgcatggttgtcgtcagctcgtgtcgtgagatgttgggttaagtcccgcaacgagcgcaacccctattgttagttgccatcatttagttgggcactctagcgagactgccggtaataaaccggaggaaggtggggatgacgtcaaatcatcatgccccttatgacctgggctacacacgtgctacaatggttggtacaacgagtcgcaagtcggtgacggcaagcaaatctcttaaagccaatctcagttcggattgtaggctgcaactcgcctacatgaagtcggaatcgctagtaatcgcggatcagcacgccgcggtgaatacgttcccgggccttgtacacaccgcccgtcacaccacgagagtttgtaacacccgaagtcggtgaggtaaccatttaggagccagccgcctaaggtgggatagatgattggggtgaagtcgtaacaaggtagccgtatcggaaggtgcggctggatcacctcctttct

SEQ ID NO: 1790 - DNA, 1472 bp, Streptococcus canis
tgtttgatcctggctcaggacgaacgctggcggcgtgcctaatacatgcaagtagaacgctgaggacaggtgcttgcactagtctaaggagttgcgaacgggtgagtaacgcgtaggtaacctacctgatagcgggggataactattggaaacgatagctaataccgcataaaagtgcttaacacatgttaagaacttaaaaggggcaactgctccactatgagatggacctgcgttgtattagctagttggtgaggtaaaggctcaccaaggcgacgatacatagccgacctgagagggtgatcggccacactgggactgagacacggcccagactcctacgggaggcagcagtagggaatcttcggcaatggggggaaccctgaccgagcaacgccgcgtgagtgaagaaggttttcggatcgtaaagctctgttgttagagaagaacggtaatgggagtggaaaacccattatgtgacggtaactaaccagaaagggacggctaactacgtgccagcagccgcggtaatacgtaggtcccgagcgttgtccggatttattgggcgtaaagcgagcgcaggcggttctttaagtctgaagttaaaggcattggctcaaccaatgtatgctttggaaactggagaacttgagtgcagaaggggagagtggaattccatgtgtagcggtgaaatgcgtagatatatggaggaacaccggtggcgaaagcggctctctggtctgtaactgacgctgaggctcgaaagcgtggggagcaaacaggattagataccctggtagtccacgccgtaaacgatgagtgctaggtgttagcccctttccggggcttagtgccggagctaacgcattaagcactccgcctggggagtacgaccgcaaggttgaaactcaaaggaattgacgggggcccgcacaagcggtggagcatgtggtttaattcgaagcaacgcgaagaaccttaccaggtcttgacatcccgatgcccgctctagagatagagttttacttcggtacatcggtgacaggtggtgcatggttgtcgtcagctcgtgtcgtgagatgttgggttaagtcccgcaacgagcgcaacccctattgttagttgccatcattaagttgggcactctagcgagactgccggtaataaaccggaggaaggtggggatgacgtcaaatcatcatgccccttatgacctgggctacacacgtgctacaatggttggtacaacgagtcgcaagccggtgacggcaagctaatctctgaaagccaatctcagttcggattgtaggctgcaactcgcctacatgaagtcggaatcgctagtaatcgcggatcagcacgccgcggtgaatacgttcccgggcctggtacacaccgcccgtcacaccacgagagtttgtaacacccgaagtcggtgaggtaacctattaggagccagccgcctaaggtgg

SEQ ID NO: 1791 - DNA, 1508 bp, Streptococcus constellatus
gacgaacgctggcggcgtgcctaatacatgcaagtagaacgcacaggatgcaccgtagtttactacaccgtattctgtgagttgcgaacgggtgagtaacgcgtaggtaacctgcctggtagcgggggataactattggaaacgatagctaataccgcataagaacatttactgcatggtagatgtttaaaaggtgcaagagcatcactaccagatggacctgcgttgtattagctagttggtgaggtaacggctcaccaaggcaacgatacatagccgacctgagagggtgatcggccacactgggactgagacacggcccagactcctacgggaggcagcagtagggaatcttcggcaatggggggaaccctgaccgagcaacgccgcgtgagtgaagaaggttttcggatcgtaaagctctgttgttaaggaagaacgtgtgtgagagtggaaagttcacacagtgacggtacttaaccagaaagggacggctaactacgtgccagcagccgcggtaatacgtaggtcccgagcgttgtccggatttattgggcgtaaagcgagcgcaggcggttagataagtctgaagtgaaaggcagtggctcaaccattgtaggctttggaaactgtttaacttgagtgcagaaggggagagtggaattccatgtgtagcggtgaaatgcgtagatatatggaggaacaccggtggcgaaagcggctctctggtctgtaactgacgctgaggctcgaaagcgtggggagcgaacaggattagataccctggtagtccacgccgtaaacgatgagtgctaggtgttaggtcctttccgggacttagtgccgcagctaacgcattaagcactccgcctggggagtacgaccgcaaggttgaaactcaaaggaattgacgggggcccgcacaagcggtggagcatgtggtttaattcgaagcaacgcgaagaaccttaccaggtcttgacatcccgatgcccgctctagagatagagctttacttcggtacatcggtgacaggtggtgcatggttgtcgtcagctcgtgtcgtgagatgttgggttaagtcccgcaacgagcgcaacccttattgttagttgccatcattcagttgggcactctagcgagactgccggtaataaaccggaggaaggtggggatgacgtcaaatcatcatgccccttatgacctgggctacacacgtgctacaatggctggtacaacgagtcgcaagccggtgacggcaagctaatctctgaaagccagtctcagttcggattgtaggctgcaactcgcctacatgaagtcggaatcgctagtaatcgcggatcagcacgccgcggtgaatacgttcccgggccttgtacacaccgcccgtcacaccacgagagtttgtaacacccgaagtcggtgaggtaaccgtaaggagccagccgcctaaggtgggatagatgattggggtgaagtcgtaacaaggtagccgtatcggaagg

SEQ ID NO: 1792 - DNA, 1544 bp, Streptococcus cristatus
tgagagtttgatcctggctcaggacgaacgctggcggcgtgcctaatacatgcaagtagaacgctgaaggaggagcttgctcttctggatgagttgcgaacgggtgagtaacgcgtaggtaacctacctggtagcgggggataactattggaaacgatagctaataccgcataatattgactattgcatgatagtcaattaaaaggtgcaaatgcaccactaccagatggacctgcgttgtattagctagttggtggggtaacggctcaccaaggcgacgatacatagccgacctgagagggtgatcggccacactgggactgagacacggcccagactcctacgggaggcagcagtagggaatcttcggcaatggacggaagtctgaccgagcaacgccgcgtgagtgaagaaggttttcggatcgtaaagctctgttgtaagagaagaacgagtgtgagagtggaaagttcacactgtgacggtatcttaccagaaagggacggctaactacgtgccagcagccgcggtaatacgtaggtcccgagcgttgtccggatttattgggcgtaaagcgagcgcaggcggttagataagtctgaagttaaaggctgtggcttaaccatagtacgctttggaaactgtttaacttgagtgcagaaggggagagtggaattccatgtgtagcggtgaaatgcgtagatatatggaggaacaccggtggcgaaagcggctctctggtctgtaactgacgctgaggctcgaaagcgtggggagcaaacaggattagataccctggtagtccacgccgtaaacgatgagtgctaggtgttgggtcctttccgggactcagtgccgcagctaacgcattaagcactccgcctggggagtacgaccgcaaggttgaaactcaaaggaattgacgggggcccgcacaagcggtggagcatgtggtttaattcgaagcaacgcgaagaaccttaccaggtcttgacatcccggtgcccgtcctagagataggattttgcttcggcacaccggtgacaggtggtgcatggttgtcgtcagctcgtgtcgtgagatgttgggttaagtcccgcaacgagcgcaacccttattgttagttgccatcatttagttgggcactctagcgagactgccggtaataaaccggaggaaggtggggatgacgtcaaatcatcatgccccttatgacctgggctacacacgtgctacaatggctggtacaacgagtcgcaagtcggtgacggcaagctaatctcttaaagccagtctcagttcggattgtaggctgcaactcgcctacatgaagtcggaatcgctagtaatcgcggatcagcacgccgcggtgaatacgttcccgggccttgtacacaccgcccgtcacaccacgagagtttgtaacacccgaagtcggtgaggtaaccttttaggagccagccgcctaaggtgggatagatgattggggtgaagtcgtaacaaggtagccgtatcggaaggtgcggctggatcacctcctttct

SEQ ID NO: 1793 - DNA, 1555 bp, Streptococcus downei
tgagagtttgatcctggctcaggacgaacgctggcggcgtgcctaatacatgcaagtggaacgcattgatatcaccggagcttgctccactgatattaatgagtcgcgaacgggtgagtaacgcgtaggtaacctgcctgatagcgggggataactattggaaacgatagctaataccgcatgagagtgtttaacacatgttagagacttaaaagataccattgtatcactatcagatggacctgcgttgtattagctagttggtagggtagcggcctaccaaggcaccgatacatagccgacctgagagggtgatcggccacactgggactgagacacggcccagactcctacgggaggcagcagtagggaatcttcggcaatggacgaaagtctgaccgagcaacgccgcgtgagtgaagaaggttttcggatcgtaaagctctgttgtagcggaagaacgcgtgtaagagtggaaagtttacacagtgacggtacgctaccagaaagggacggctaactacgtgccagcagccgcggtaatacgtaggtcccgagcgttgtccggatttattgggcgtaaagggagcgcaggcggtttagtaagtctgaagttaaaggcattggctcaaccaatgtatgctttggaaactgttagacttgagtgcagaaggggagagtggaattccatgtgtagcggtgaaatgcgtagatatatggaggaacaccggtggcgaaagcggctctctggtctgtcactgacgctgaggctcgaaagcgtgggtagcgaacaggattagataccctggtagtccacgccgtaaacgatgagtgctaggtgttaggtcctttccgggacttagtgccgcagctaacgcaataagcactccgcctggggagtacgaccgcaaggttgaaactcaaaggaattgacgggggcccgcacaagcggtggagcatgtggtttaattcgaagcaacgcgaagaaccttaccaggtcttgacatcccgatgcccgctctagagatagagttttactttttgtacatcggagacaggtggtgcatggttgtcgtcagctcgtgtcgtgagatgttgggttaagtcccgcaacgagcgcaacccttattgttagttgccatcattgagttgggcactctagcgagactgccggtaataaaccggaggaaggtggggatgacgtcaaatcatcatgccccttatgacctgggctacacacgtgctacaatggttggtacaacgagtcgcaagccggtgacggcaagctaatctctgaaagccaatctcagttcggattgtaggctgcaactcgcctacatgaagtcggaatcgctagtaatcgcggatcagcacgccgcggtgaatacgttcccgggccttgtacacaccgcccgtcacaccacgagagtttgtaacacccaaagtcggtgaggtaaccttataggagccagccgcctaaggtgggacagatgattggggtgaagtcgtaacaaggtagccgtatcggaaggtgcggctggatcacctcctttct

SEQ ID NO: 1794 - DNA, 1546 bp, Streptococcus dysgalactiae
tgagagtttgatcctggctcaggacgaacgctggcggcgtgcctaatacatgcaagtagaacgctgaggactggtgcttgcaccggtccaaggagttgcgaacgggtgagtaacgcgtaggtaacctacctcatagcgggggataactattggaaacgatagctaataccgcataaaagtgtttaacccatgttaaccatttaaaaggtgcaattgcatcactatgagatggacctgcgttgtattagctagttggtgaggtaacggctcaccaaggcgacgatacatagccgacctgagagggtgatcggccacactgggactgagacacggcccagactcctacgggaggcagcagtagggaatcttcggcaatggacggaagtctgaccgagcaacgccgcgtgagtgaagaaggttttcggatcgtaaagctctgttgttagagaagaatgatggtgggagtggaaaatccaccatgtgacggtaactaaccagaaagggacggctaactacgtgccagcagccgcggtaatacgtaggtcccgagcgttgtccggatttattgggcgtaaagcgagcgcaggcggttctttaagtctgaagttaaaggcagtggctcaaccattgtacgctttggaaactggagaacttgagtgcagaaggggagagtggaattccatgtgtagcggtgaaatgcgtagatatatggaggaacaccggtggcgaaagcggctctctggtctgtaactgacgctgaggctcgaaagcgtggggagcaaacaggattagataccctggtagtccacgccgtaaacgatgagtgctaggtgttaggccctttccggggcttagtgccggagctaacgcattaagcactccgcctggggagtacgaccgcaaggttgaaactcaaaggaattgacgggggcccgcacaagcggtggagcatgtggtttaattcgaagcaacgcgaagaaccttaccaggtcttgacatcctcctgaccggtctagagataggctttcccttcggggcaggagtgacaggtggtgcatggttgtcgtcagctcgtgtcgtgagatgttgggttaagtcccgcaacgagcgcaacccctattgttagttgccatcattaagttgggcactctagcgagactgccggtaataaaccggaggaaggtggggatgacgtcaaatcatcatgccccttatgacctgggctacacacgtgctacaatggttggtacaacgagtcgcaagccggtgacggcaagctaatctcttaaagccaatctcagttcggattgtaggctgcaactcgcctacatgaagtcggaatcgctagtaatcgcggatcagcacgccgcggtgaatacgttcccgggccttgtacacaccgcccgtcacaccacgagagtttgtaacacccgaagtcggtgaggtaacctattaggagccagccgcctaaggtgggatagatgattggggtgaagtcgtaacaaggtagccgtatcggaaggtgcggctggatcacctcctttct

SEQ ID NO: 1795 - DNA, 1545 bp, Streptococcus equi
gagagtttgatcctggctcaggacgaacgctggcggcgtgcctaatacatgcaagtagaacgcagaggtcaggtgcttgcactagactgatgagttgcgaacgggtgagtaacgcgtaggtaacctagcttatagcgggggataactattggaaacgatagctaataccgcataaaagtggttgacccatgttaacgatttaaaaggagcaacagctccactatgagatggacctgcgttgtattagctagttggtagggtaaaggcctaccaaggcgacgatacatagccgacctgagagggtgaacggccacactgggactgagacacggcccagactcctacgggaggcagcagtagggaatcttcggcaatggggggaaccctgaccgagcaacgccgcgtgagtgaagaaggttttcggatcgtaaagctctgttgttagagaagaacagtgatgggagtggaaagtccatcatttgacggtaactaaccagaaagggacggctaactacgtgccagcagccgcggtaatacgtaggtcccgagcgttgtccggatttattgggcgtaaagcgagcgcaggcggtttgataagtctgaagttaaaggcagtggcttaaccattgtatgctttggaaactgttaaacttgagtgcagaaggggagagtggaattccatgtgtagcggtgaaatgcgtagatatatggaggaacaccggtggcgaaagcggctctctggtctgtaactgacgctgaggctcgaaagcgtggggagcaaacaggattagataccctggtagtccacgccgtaaacgctgagtgctaggtgttaggccctttccggggcttagtgccgtagctaacgcattaagcactccgcctggggagtacgaccgcaaggttgaaactcaaaggaattgacgggggcccgcacaagcggtggagcatgtggtttaattcgaagcaacgcgaagaaccttaccaggtcttgacatcccgatgctattcttagagataagaagttacttcggtacattggagacaggtggtgcatggttgtcgtcagctcgtgtcgtgagatgttgggttaagtcccgcaacgagcgcaacccttattgttagttgccatcattaagttgggcactctagcgagactgccggtaataaaccggaggaaggtggggatgacgtcaaatcatcatgccccttatgacctgggctacacacgtgctacaatggttggtacaacgagtcgcaagccggtgacggcaagctaatctctgaaagccaatctcagttcggattgtaggctgcaactcgcctacatgaagtcggaatcgctagtaatcgcggatcagcacgccgcggtgaatacgttcccgggccttgtacacaccgcccgtcacaccacgagagtttgtaacacccgaagtcggtgaggtaaccgttaaggagccagccgcctaaggtgggatagatgattggggtgaagtcgtaacaaggtagccgtatcggaaggtgcggctggatcacctcctttct

SEQ ID NO: 1796 - DNA, 1545 bp, Streptococcus equinus
tgagagtttgatcctggctcaggacgaacgctggcggcgtgcctaatacatgcaagtagaacgctgaagactttagcttgctaaagttggaagagttgcgaacgggtgagtaacgcgtaggtaacctgcctactagcgggggataactattggaaacgatagctaataccgcataacagcatttaacacatgttagatgcttgaaagaagcaattgcttcactagtagatggacctgcgttgtattagctagttggtgaggtaaaggctcaccaaggcgacgatacatagccgacctgagagggtgatcggccacactgggactgagacacggcccagactcctacgggaggcagcagtagggaatcttcggcaatgggggcaaccctgaccgagcaacgccgcgtgagtgaagaaggttttcggatcgtaaagctctgttgtaagagaagaacgtgtgtgagagtggaaagttcacacagtgacggtaacttaccagaaagggacggctaactacgtgccagcagccgcggtaatacgtaggtcccgagcgttgtccggatttattgggcgtaaagcgagcgcaggcggtttaataagtctgaagttaaaggcagtggcttaaccattgttcgctttggaaactgttagacttgagtgcagaaggggagagtggaattccatgtgtagcggtgaaatgcgtagatatatggaggaacaccggtggcgaaagcggctctctggtctgtaactgacgctgaggctcgaaagcgtggggagcaaacaggattagataccctggtagtccacgccgtaaacgatgagtgctaggtgttaggccctttccggggcttagtgccgcagctaacgcattaagcactccgcctggggagtacgaccgcaaggttgaaactcaaaggaattgacgggggcccgcacaagcggtggagcatgtggtttaattcgaagcaacgcgaagaaccttaccaggtcttgacatcccgatgctatttctagagataggaagtttcttcggaacatcggtgacaggtggtgcatggttgtcgtcagctcgtgtcgtgagatgttgggttaagtcccgcaacgagcgcaacccctattgttagttgccatcattaagttgggcactctagcgagactgccggtaataaaccggaggaaggtggggatgacgtcaaatcatcatgccccttatgacctgggctacacacgtgctacaatggttggtacaacgagtcgcgagtcggtgacggcaagcaaatctcttaaagccaatctcagttcggattgtaggctgcaactcgcctacatgaagtcggaatcgctagtaatcgcggatcagcacgccgcggtgaatacgttcccgggccttgtacacaccgcccgtcacaccacgagagtttgtaacacccgaagtcggtgaggtaaccttttggagccagccgcctaaggtgggatagatgattggggtgaagtcgtaacaaggtagccgtatcggaaggtgcggctggatcacctcctttct

SEQ ID NO: 1797 - DNA, 1546 bp, Streptococcus gallolyticus
tgagagtttgatcctggctcaggacgaacgctggcggcgtgcctaatacatgcaagtagaacgctgactactttagcttgctagagtagaaggagttgcgaacgggtgagtaacgcgtaggtaacctgcctactagcgggggataactattggaaacgatagctaataccgcataacagtgtttaacacatgttagatgcttgaaagatgcaaatgcatcactagtagatggacctgcgttgtattagctagttggtggggtaacggcctaccaaggcgacgatacatagccgacctgagagggtgatcggccacactgggactgagacacggcccagactcctacgggaggcagcagtagggaatcttcggcaatgggggcaaccctgaccgagcaacgccgcgtgagtgaagaaggttttcggatcgtaaagctctgttgtaagagaagaacgtgtgtgagagtggaaagttcacacagtgacggtaacttaccagaaagggacggctaactacgtgccagcagccgcggtaatacgtaggtcccgagcgttgtccggatttattgggcgtaaagcgagcgcaggcggtttaataagtctgaagttaaaggcagtggcttaaccattgttcgctttggaaactgttaaacttgagtgcagaaggggagagtggaattccatgtgtagcggtgaaatgcgtagatatatggaggaacaccggtggcgaaagcggctctctggtctgtaactgacgctgaggctcgaaagcgtggggagcaaacaggattagataccctggtagtccacgccgtaaacgatgagtgctaggtgttaggccctttccggggcttagtgccgcagctaacgcattaagcactccgcctggggagtacgaccgcaaggttgaaactcaaaggaattgacgggggcccgcacaagcggtggagcatgtggtttaattcgaagcaacgcgaagaaccttaccaggtcttgacatcccgatgctatttctagagatagaaagtttcttcggaacatcggtgacaggtggtgcatggttgtcgtcagctcgtgtcgtgagatgttgggttaagtcccgcaacgagcgcaacccctattgttagttgccatcattcagttgggcactctagcgagactgccggtaataaaccggaggaaggtggggatgacgtcaaatcatcatgccccttatgacctgggctacacacgtgctacaatggttggtacaacgagtcgcaagtcggtgacggcaagcaaatctcttaaagccaatctcagttcggattgtaggctgcaactcgcctacatgaagtcggaatcgctagtaatcgcggatcagcacgccgcggtgaatacgttcccgggccttgtacacaccgcccgtcacaccacgagagtttgtaacacccgaagtcggtgaggtaaccttttaggagccagccgcctaaggtgggatagatgattggggtgaagtcgtaacaaggtagccgtatcggaaggtgcggctggatcacctcctttct

SEQ ID NO: 1798 - DNA, 1293 bp, Streptococcus sp.
  C1
gatgaacgctggcggcgtgcctaatacatgcaagtagaacgagttgcgaacgggtgagtaacgcgtaggtaacctgcctcttagcgggggataactattggaaacgatagctaataccgcataagaaagtcactaagagatggacctgcgttgtattagctagttggtgaggtaacggctcaccaaggcgacgatacatagccgacctgggagggtgatcggccacactgggactgagacacggcccagactcctacgggaggcagcagtagggaatcttcggcaatgggggcaaccctgaccgagcaacgccgcgtgagtgaagaaggttttcggatcgtaaagctctgttgtaagagaagatgacggtaacttaccagaaagggacggctaactacgtgccagcagccgcggtaatacgtaggtcccgagcgttatccggatttattgggcgtaaagcgagcgcaggcggttagataggtctgaagttaaaggctgtggcttaaccatagtacgctttggaaactgtttaacttgagtgcagaaggggagagtggaattccatgtgtagcggtgaaatgcgtagatatatggaggaacaccggtggcgaaagcggctctctggtctgactgacgctgaggctcgaaagcgtggggagcaaacaggattagataccctggtagtccacgccgtaaacgatgagtgctgggtgttgggtactcagtgccgcagctaacgcattaagcactccgcctggggagtacgaccgcaaggttgaaactcaaaggaattgacgggggcccgcacaagcggtggagcatgtggtttaattcgaagcaacgcgaagaaccttaccaggtcttgacatcgacaggtggtgcatggttgtcgtcagctcgtgtcgtgagatgttgggttaagtcccgcaacgagcgcaacccctattgttagttgccatcatgggcactctagcgagactgccggtaataaaccggaggaaggtggggatgacgtcaaatcatcatgccccttatgacctgggctacacacgtgctacaatggctggcaacgagtcgcgagtcggtgacggcaagctaatctcttccagtctcagttcggatgtaggctgcaactcgcctacagaagtcggaatcgctagtaatcgcggatcagcacgccgcggtgaatacgttcccgggccttgtacacaccgcccgtcacaccacgagagtttgtaacacccgaagtcggtaggtagccagccgcctaaggtgggatagatgattggggtg

SEQ ID NO: 1799 - DNA, 1294 bp, Streptococcus sp.
  C2
gacgaacgctggcggcgtgcctaatacatgcaagtagaacgagttgcgaacgggtgagtaacgcgtaggtaacctgcctggtagcgggggataactattggaaacgatagctaataccgcataagaaaagtcactaccagatggacctgcgttgtattagctagttggtgaggtaacggctcaccaaggcgacgatacatagccgacctgagagggtgattggccacactgggactgagacacggcccagactcctacgggaggcagcagtagggaatcttcggcaatggacggaagtctgaccgagcaacgccgcgtgtgtgaagaaggttttcggatcgtaaagctctgttgtaagagaagatgacggtatcttaccagaaagggacggctaactacgtgccagcagccgcggtaatacgtaggtcccaagcgttgtccggatttattgggcgtaaagcgagcgcaggcggttagataagtctgaagttaaaggctgtggcttaaccatagtacgctttggaaactgtttaacttgagtgcaagaggggagagtggaattccatgtgtagcggtgaaatgcgtagatatatggaggaacaccggtggcgaaagcggctctctggcttgactgacgctgaggctcgaaagcgtggggagcaaacaggattagataccctggtagtccacgccgtaaacgatgagtgctaggtgttagacgtttagtgccgcagctaacgcattaagcactccgcctggggagtacgaccgcaaggttgaaactcaaaggaattgacgggggcccgcacaagcggtggagcatgtggtttaattcgaagcaacgcgaagaaccttaccaggtcttgacatcgacaggtggtgcatggttgtcgtcagctcgtgtcgtgagatgttgggttaagtcccgcaacgagcgcgacccctattgttagttgccatcatgggcactctagcgagactgccggtaataaaccggaggaaggtggggatgacgtcaaatcatcatgccccttatgacctgggctacacacgtgctacaatggctggcaacgagtcgcaagccggtgacggcaagctaatctcttccagtctcagttcggatgtaggctgcaactcgcctacagaagtcggaatcgctagtaatcgcggatcagcacgccgcggtgaatacgttccctggccttgtacacaccgcccgtcacaccacgagagtttgtaacacccgaagtcggtaggtagccagccgcctaaggtgggatagatgattggggtg

SEQ ID NO: 1800 - DNA, 1327 bp, Streptococcus sp.
  C3
gacgaacgctggcggcgtgcctaatacatgcaagtagaacgagttgcgaacgggtgagtaacgcgtaggtaacctgcctggtagcgggggataactattggaaacgatagctaataccgcataaagaaagtcactaccagatggacctgcgttgtattagctagttggtggggtaacggctcaccaaggcgacgatacatagccgacctgagagggtgatcggccacactgggactgagacacggcccagactcctacgggaggcagcagtagggaatcttcggcaatggacggaagtctgaccgagcaacgccgcgtgagtgaagaaggttttcggatcgtaaagctctgttgtaagagaagatgacggtatcttaccagaaagggacggctaactacgtgccagcagccgcggtaatacgtaggtcccgagcgttgtccggatttattgggcgtaaagcgagcgcaggcggttagataagtctgaagttaaaggctgtggcttaaccatagtacgctttggaaactgtttaacttgagtgcaagaggggagagtggaattccatgtgtagcggtgaaatgcgtagatatatggaggaacaccggtggcgaaagcggctctctggcttgactgacgctgaggctcgaaagcgtggggagcaaacaggattagataccctggtagtccacgccgtaaacgatgagtgctaggtgttagacgtttagtgccgcagctaacgcattaagcactccgcctggggagtacgaccgcaaggttgaaactcaaaggaattgacgggggcccgcacaagcggtggagcatgtggtttaattcgaagcaacgcgaagaaccttaccaggtcttgacatcgacaggtggtgcatggttgtcgtcagctcgtgtcgtgagatgttgggttaagtcccgcaacgagcgcaacccctattgctagttgccatcatgggcactctagcgagactgccggtaataaaccggaggaaggtggggatgacgtcaaatcatcatgccccttatgacctgggctacacacgtgctacaatggctggcaacgagtcgcaagccggtgacggcaagctaatctcttccagtctcagttcggatgtaggctgcaactcgcctacagaagtcggaatcgctagtaatcgcggatcagcacgccgcggtgaatacgttcccgggccttgtacacaccgcccgtcacaccacgagagtttgtaacacccgaagtcggtaggtagccagccgcctaaggtgggatagatgattggggtgaagtcgtaacaaggtagccgtatcggaaggtgc

SEQ ID NO: 1801 - DNA, 1327 bp, Streptococcus sp.
  C4
gacgaacgctggcggcgtgcctaatacatgcaagtagaacgagttgcgaacgggtgagtaacgcgtaggtaacctgcctggtagcgggggataactattggaaacgatagctaataccgcataaaaaaagtcactaccagatggacctgcgttgtattagctagttggtggggtaacggctcaccaaggcaacgatacatagccgacctgagagggtgatcggccacactgggactgagacacggcccagactcctacgggaggcagcagtagggaatcttcggcaatggacggaagtctgaccgagcaacgccgcgtgagtgaagaaggttttcggatcgtaaagctctgttgtaagagaagatgacggtatcttaccagaaagggacggctaactacgtgccagcagccgcggtaatacgtaggtcccgagcgttgtccggatttattgggcgtaaagcgagcgcaggcggttagataagtctgaagttaaaggctgtggcttaaccatagtacgctttggaaactgtttaacttgagtgcaagaggggagagtggaattccatgtgtagcggtgaaatgcgtagatatatggaggaacaccggtggcgaaagcggctctctggcttgactgacgctgaggctcgaaagcgtggggagcaaacaggattagataccctggtagtccacgccgtaaacgatgagtgctaggtgttagacgtttagtgccgcagctaacgcattaagcactccgcctggggagtacgaccgcaaggttgaaactcaaaggaattgacgggggcccgcacaagcggtggagcatgtggtttaattcgaagcaacgcgaagaaccttaccaggtcttgacatcgacaggtggtgcatggttgtcgtcagctcgtgtcgtgagatgttgggttaagtcccgcaacgagcgcaacccctattgttagttgccatcatgggcactctagcgagactgccggtaataaaccggaggaaggtggggatgacgtcaaatcatcatgccccttatgacctgggctacacacgtgctacaatggctggcaacgagtcgcaagccggtgacggcaagctaatctcttccagtctcagttcggatgtaggctgcaactcgcctacagaagtcggaatcgctagtaatcgcggatcagcacgccgcggtgaatacgttcccgggccttgtacacaccgcccgtcacaccacgagagtttgtaacacccgaagtcggtaggtagccagccgcctaaggtgggatagatgattggggtgaagtcgtaacaaggtagccgtatcggaaggtgc

SEQ ID NO: 1802 - DNA, 1294 bp, Streptococcus sp.
  C5
gacgaacgctggcggcgtgcctaatacatgcaagtagaacgagttgcgaacgggtgagtaacgcgtaggtaacctgcctggtagcgggggataactattggaaacgatagctaataccgcataacgaaagtcactaccagatggacctgcgttgtattagctagttggtggggtaacggctcaccaaggcgacgatacatagccgacctgagagggtgatcggccacactgggactgagacacggcccagactcctacgggaggcagcagtagggagtcttcggcaatggacggaagtctgaccgagcaacgccgcgtgagtgaagaaggttttcggatcgtaaagctctgttgtaagagaagatgacggtatcttaccagaaagggacggctaactacgtgccagcagccgcggtaatacgtaggtcccgagcgttgtccggatttattgggtgtaaagcgagcgcaggcggttagataagtctgaagttaaaggctgtggcttaaccatagtacgctttggaaactgtttaacttgagtgcaagaggggagagtggaattccatgtgtagcggtgaaatgcgtagatatatggaggaacaccggtggcgaaagcggctctctggcttgactgacgctgaggctcgaaagcgtggggagcaaacaggattagataccctggtagtccacgccgtaaacgatgagtgctaggtgttagacgtttagtgccgcagctaacgcattaagcactccgcctggggagtacgaccgcaaggttgaaactcaaaggaattgacgggggcccgcacaagcggtggagcatgtggtttaattcgaagcaacgcgaagaaccttaccaggtcttgacatcgacaggtggtgcatggttgtcgtcagctcgtgtcgtgagatgttgggttaagtcccgcaacgagcgcaacccctattgttagttgccatcatgggcactctagcgagactgccggtaataaaccggaggaaggtggggatgacgtcaaatcatcatgccccttatgacctgggctacacacgtgctacaatggctggcaacgagtcgcaagtcggtgacggcaagctaatctcttccagtctcagttcggatgtaggctgcaactcgcctacagaagtcggaatcgctagtaatcgcggatcagcacgccgcggtgaatacgttcccgggccttgtacacaccgcccgccacaccacgagagtttgtaacacccgaagtcggtaggtagccagccgcctaaggtgggatagatgattggggtg

SEQ ID NO: 1803 - DNA, 1293 bp, Streptococcus sp.
  C6
gatgaacgctggcggcgtgcctaatacatgcaagtagaacgagttgcgaacgggtgagtaacgcgtaggtaacctgcctcttagcgggggataactattggaaacgatagctaataccgcataagaaagtcactaagagatggacctgcgttgtattagctagttggtgaggtaacggctcaccaaggcgacgatacacagccgacctgagagggtgatcggccacactgggactgagacacggcccagactcctacgggaggcagcagtagggaatcttcggcaatgggggcaaccctgaccgagcaacgccgcgtgagtgaagaaggttttcggatcgtaaagctctgttgtaagagaagatgacggtaacttaccagaaagggacggctaactacgtgccagcagccgcggtaatacgtaggtcccgagcgttatccggatttattgggcgtaaagcgagcgcaggcggttagataagtctgaagttaaaggctgtggcttaaccatagtacgctttggaaactgtttaacttgagtgcagaaggggagagtggaattccatgtgtagcggtgaaatgcgtagatatatggaggaacaccggtggcgaaagcggctctctggtctgactgacgctgaggctcgaaagcgtggggagcaaacaggattagataccctggtagtccacgccgtaaacgatgagtgctaggtgttgggtactcagtgccgcagctaacgcattaagcactccgcctggggagtacgaccgcaaggttgaaactcaaaggaattgacgggggcccgcacaagcggtggagcatgtggtttaattcgaagcaacgcgaagaaccttaccaggccttgacatcgacaggtggtgcatggttgtcgtcagctcgtgtcgtgagatgttgggttaagtcccgcaacgagcgcaacccctattgttagttgccatcatgggcactctagcgagactgccggtaataaaccggaggaaggtggggatgacgtcaaatcatcatgccccttatgacctgggctacacacgtgctacaatggctggcaacgagtcgcgagtcggtgacggcaagctaacctcttccagtctcagttcggatgtaggctgcaactcgcctacagaagtcggaatcgctagtaatcgcagatcagcacgccgcggtgaatacgttcccgggccttgtacacaccgcccgtcacaccacgagagtttgtaacacccgaagtcggtaggttgccagccgcctaaggtgggatagatgattggggtg

SEQ ID NO: 1804 - DNA, 1294 bp, Streptococcus sp.
  C7
gatgaacgctggcggcgtgcctaatacatgcaagtagaacgagttgcgaacgggtgagtaacgcgtaggtaacctgcctcttagcgggggataactattggaaacgatagctaataccgcataaagaaagtcactaagagatggacctgcgttgtattagctagttggtgaggtaacggctcaccaaggcgacgatacatagccgacctgagagggtgatcggccacactgggactgagacacggcccagactcctacgggaggcagcagtagggaatcttcggcaatgggggcaaccctgaccgagcaacgccgcgtgagtgaagaaggttttcggatcgtaaggctctgttgtaagagaagatgacggtatcttaccagaaagggacggctaactacgtgccagcagccgcggtaatacgtaggtcccgagcgttatccggatttattgggcgtaaagcgagcgcaggcggttagataagtctgaagttaaaggctgtggcttaaccatagtacgctttggaaactgtttaacttgagtgcagaaggggagagtggaattccatgtgtagcggtgaaatgcgtagatatatggaggaacaccggtggcgaaagcggctctctggtctgactgacgctgaggctcgaaagcgtggggagcaaacaggattagataccctggtagtccacgccgtaaacgatgagtgctaggtgttgggtactcagtgccgcagctaacgcattaagcactccgcctggggagtacgaccgcaaggttgaaactcaaaggaattgacgggggcccgcacaagcggtggagcatgtggtttaattcgaagcaacgcgaagaaccttaccaggtcttgacatcgacaggtggtgcatggttgtcgtcagctcgtgtcgtgagatgttgggttaagtcccgcaacgagcgcaacccctattgttagttgccatcatgggcactctagcgagactgccggtaataaaccggaggaaggtggggatgacgtcaaatcatcatgccccttatgacctgggctacacacgtgctacaatggctggcaacgagtcgcgagtcggtgacggcaagctaatctcttccagtctcagttcggatgtaggctgcaactcgcctacagaagtcggaatcgctagtaatcgcggatcagcacgccgcggtgaatacgttcccgggccttgtacacaccgcccgtcacaccacgagagtttgtaacacccgaagtcggtaggtagccagccgcctaaggtgggatagatgattggggtg

SEQ ID NO: 1805 - DNA, 1327 bp, Streptococcus sp.
  C8
gacgaacgctggcggcgtgcctaatacatgcaagtagaacgagttgcgaacgggtgagtaacgcgtaggtaacctgcctggtagcgggggataactattggaaacgatagctaataccgcataataaaagtcactaccagatggacctgcgttgtattagctagttggtgaggtaacggctcaccaaggcaacgatacatagccgacctgagagggtgatcggccacactgggactgagacacggcccagactcctacgggaggcagcagtagggaatcttcggcaatggacggaagtctgaccgagcaacgccgcgtgagtgaagaaggttttcggatcgtaaagctctgttgtaagagaagatgacggtatcttaccagaaagggacggctaactacgtgccagcagccgcggtaatacgtaggtcccgagcgttgtccggatttattgggcgtaaagcgagcgcaggcggttagataagtctgaagttaaaggctgtggcttaaccatagtacgctttggaaactgtttaacttgagtgcaagaggggagagtggaattccatgtgtagcggtgaaatgcgtagatatatggaggaacaccggtggcgaaagcggctctctggcttgactgacgctgaggctcgaaagcgtggggagcaaacaggattagataccctggtagtccacgccgtaaacgatgagtgctaggtgttagacgtttagtgccgcagctaacgcattaagcactccgcctggggagtacgaccgcaaggttgaaactcaaaggaattgacgggggcccgcacaagcggtggagcatgtggtttaattcgaagcaacgcgaagaaccttaccaggtcttgacatcgacaggtggtgcatggttgtcgtcagctcgtgtcgtgagatgttgggttaagtcccgcaacgagcgcaacccctattgttagttgccatcatgggcactctagcgagactgccggtaataaaccggaggaaggtggggatgacgtcaaatcatcatgccccttatgacctgggctacacacgtgctacaatggctggcaacgagtcgcaagccggtgacggcaagctaatctcttccagtctcagttcggatgtaggctgcaactcgcctacagaagtcggaatcgctagtaatcgcggatcagcacgccgcggtgaatacgttcccgggccttgtacacaccgcccgtcacaccacgagagtttgtaacacccgaagtcggtaggtagccagccgcctaaggtgggatagatgattggggtgaagtcgtaacaaggtagccgtatcggaaggtgc

SEQ ID NO: 1806 - DNA, 962 bp, Streptococcus gordonii
  modified_base (17)..(17): a, c, t, g, unknown or other
  modified_base (953)..(953): a, c, t, g, unknown or other
agaaagggacggctaantacgtgccagcagccgcggtaatacgtaggtcccgagcgttgtccggatttattgggcgtaaagcgagcgcaggcggttagataagtctgaagttaaaggctgtggcttaaccatagtacgctttggaaactgtttaacttgagtgcagaaggggagagtggaattccatgtgtagcggtgaaatgcgtagatatatggaggaacaccggtggcgaaagcggctctctggtctgtaactgacgctgaggctcgaaagcgtggggagcgaacaggattagataccctggtagtccacgccgtaaacgatgagtgctaggtgttaggccctttccggggcttagtgccgcagctaacgcattaagcactccgcctggggagtacgaccgcaaggttgaaactcaaaggaattgacgggggcccgcacaagcggtggagcatgtggtttaattcgaagcaacgcgaagaaccttaccaggtcttgacatcccgatgcccgctctagagatagagttttacttcggtacatcggtgacaggtggtgcatggttgtcgtcagctcgtgtcgtgagatgttgggttaagtcccgcaacgagcgcaacccttattgttagttgccatcattcagttgggcactctagcgagactgccggtaataaaccggaggaaggtggggatgacgtcaaatcatcatgccccttatgacctgggctacacacgtgctacaatggctggtacaacgagtcgcaagtcggtgacggcaagctaatctcttaaagccagtctcagttcggattgtaggctgcaactcgcctacatgaagtcggaatcgctagtaatcgcggatcagcacgccgcggtgaatacgttcccgggccttgtacacaccgcccgtcacaccacgagagtttgtaacacccgcaagtcggtgaggtanccttttagg

SEQ ID NO: 1807 - DNA, 1546 bp, Streptococcus infantarius
tgagagtttgatcctggctcaggacgaacgctggcggcgtgcctaatacatgcaagtagaacgctgaaaactttagcttgctaaagtttgaagagttgcgaacgggtgagtaacgcgtaggtaacctgcctactagcgggggataactattggaaacgatagctaataccgcataacagcatttaacccatgttagatgcttgaaaggagcaattgcttcactagtagatggacctgcgttgtattagctagttggtgaggtaacggctcaccaaggcgacgatacatagccgacctgagagggtgatcggccacactgggactgagacacggcccagactcctacgggaggcagcagtagggaatcttcggcaatgggggcaaccctgaccgagcaacgccgcgtgagtgaagaaggttttcggatcgtaaagctctgttgtaagagaagaatgtgtgtgagagtggaaagttcacacagtgacggtaacttaccagaaagggacggctaactacgtgccagcagccgcggtaatacgtaggtcccgagcgttgtccggatttattgggcgtaaagcgagcgcaggcggtttaataagtctgaagttaaaggcagtggcttaaccattgttcgctttggaaactgttagacttgagtgcagaaggggagagtggaattccatgtgtagcggtgaaatgcgtagatatatggaggaacaccggtggcgaaagcggctctctggtctgtaactgacgctgaggctcgaaagcgtggggagcaaacaggattagataccctggtagtccacgccgtaaacgatgagtgctaggtgttaggccctttccggggcttagtgccgcagctaacgcattaagcactccgcctggggagtacgaccgcaaggttgaaactcaaaggaattgacgggggcccgcacaagcggtggagcatgtggtttaattcgaagcaacgcgaagaaccttaccaggtcttgacatcccgatgctattcctagagataggaagtttcttcggaacatcggtgacaggtggtgcatggttgtcgtcagctcgtgtcgtgagatgttgggttaagtcccgcaacgagcgcaacccctattgttagttgccatcattaagttgggcactctagcgagactgccggtaataaaccggaggaaggtggggatgacgtcaaatcatcatgccccttatgacctgggctacacacgtgctacaatggttggtacaacgagtcgcgagtcggtgacggcaagcaaatctcttaaagccaatctcagttcggattgtaggctgcaactcgcctacatgaagtcggaatcgctagtaatcgcggatcagcacgccgcggtgaatacgttcccgggccttgtacacaccgcccgtcacaccacgagagtttgtaacacccgaagtcggtgaggtaaccttttaggagccagccgcctaaggtgggatagatgattggggtgaagtcgtaacaaggtagccgtatcggaaggtgcggctggatcacctcctttct

SEQ ID NO: 1808 - DNA, 1547 bp, Streptococcus infantis
tgagagtttgatcctggctcaggatgaacgctggcggcgtgcctaatacatgcaagtagaacgctgaagcttggtgcttgcaccgagcggatgagttgcgaacgggtgagtaacgcgtaggtaacctgcctggtagcgggggataactattggaaacgatagctaataccgcatgacaacagttattgcatgataactgtttaaaaggggcaattgctccactaccagatggacctgcgttgtattagctagttggtgaggtaacggctcaccaaggcgacgatacatagccgacctgagagggtgatcggccacactgggactgagacacggcccagactcctacgggaggcagcagtagggaatcttcggcaatggacggaagtctgaccgagcaacgccgcgtgagtgaagaaggttttcggatcgtaaagctctgttgtaagagaagaacgagtgtgagagtggaaagttcacactgtgacggtatcttaccagaaagggacggctaactacgtgccagcagccgcggtaatacgtaggtcccgagcgttatccggatttattgggcgtaaagcgagcgcaggcggttagataagtctgaagttaaaggctgtggcttaaccatagtacgctttggaaactgtttaacttgagtgcaagaggggaagagtggaattccatgtgtagcggtgtaaatgcgtagatatatggaggaacaccggtggcgaaagcggctctctggcttgtaactgacgctgaggctcgaaagcgtggggagcaaacaggattagataccctggtagtccacgccgtaaacgatgagtgctaggtgttagaccctttccggggtttagtgccgtagctaacgcattaagcactccgcctggggagtacgatcgcaaggttgaaactcaaaggaattgacgggggcccgcacaagcggtggagcatgtggtttaattcgaagcaacgcgaagaaccttaccaggtcttgacatccctctgaccgctctggagatagagttttccttcgggacagaggtgacaggtggtgcatggttgtcgtcagctcgtgtcgtgagatgttgggttaagtcccgcaacgagcgcaacccctattgttagttgccatcattcagttgggcactctagcgagactgccggtaataaaccggaggaaggtggggatgacgtcaaatcatcatgccccttatgacctgggctacacacgtgctacaatggctggtacaacgagtcgcaagtcggtgacggcaagctaatctcttaaagccagtctcagttcggattgtaggctgcaactcgcctacatgaagtcggaatcgctagtaatcgcggatcagcacgccgcggtgaatacgttcccgggccttgtacacaccgcccgtcacaccacgagagtttgtaacacccgaagtcggtgaggtaaccatttggagccagccgcctaaggtgggatagatgattggggtgaagtcgtaacaaggtagccgtatcggaaggtgcggctggatcacctcctttct

SEQ ID NO: 1809 - DNA, 1544 bp, Streptococcus intermedius
tttgatcctggttcaggacgaacgctggcggcgtgcctaatacatgcaagtagaacgcacaggatgcaccgtagtttactacaccgtattctgtgagttgcgaacgggtgagtaacgcgtaggtaacctgcctggtagcgggggataactattggaaacgatagctaataccgcataagaacatttactgcatggtagatgtttaaaaggtgcaaatgcatcactaccagatggacctgcgttgtattagctagtaggtgaggtaacggctcacctaggcgacgatacatagccgacctgagagggtgatcggccacactgggactgagacacggcccagactcctacgggaggcagcagtagggaatcttcggcaatggggggaaccctgaccgagcaacgccgcgtgagtgaagaaggttttcggatcgtaaagctctgttgttaaggaagaacgagtgtgagaatggaaagttcatactgtgacggtacttaaccagaaagggacggctaactacgtgccagcagccgcggtaatacgtaggtcccgagcgttgtccggatttattgggcgtaaagcgagcgcaggcggttagataagtctgaagttaaaggcagtggctcaaccattgtaggctttggaaactgtttaacttgagtgcagaaggggagagtggaattccatgtgtagcggtgaaatgcgtagatatatggaggaacaccggtggcgaaagcggctctctggtctgtaactgacgctgaggctcgaaagcgtggggagcgaacaggattagataccctggtagtccacgccgtaaacgatgagtgctaggtgttaggtcctttccgggacttagtgccgcagctaacgcattaagcactccgcctggggagtacgaccgcaaggttgaaactcaaaggaattgacgggggcccgcacaagcggtggagcatgtggtttaattcgaagcaacgcgaagaaccttaccaggtcttgacatcccgatgcccgctctagagatagagctttacttcggtacatcggtgacaggtggtgcatggttgtcgtcagctcgtgtcgtgagatgttgggttaagtcccgcaacgagcgcaacccttattgttagttgccatcattcagttgggcactctagcgagactgccggtaataaaccggaggaaggtggggatgacgtcaaatcatcatgccccttatgacctgggctacacacgtgctacaatggctggtacaacgagtcgcaagccggtgacggcaagctaatctctgaaagccagtctcagttcggattgtaggctgcaactcgcctacatgaagtcggaatcgctagtaatcgcggatcagcacgccgcggtgaatacgttcccgggccttgtacacaccgcccgtcacaccacgagagtttgtaacacccgaagtcggtgaggtaaccgtaaggagccagccgcctaaggtgggatagatgattggggtgaagtcgtaacaaggtagccgtatcggaaggtgcggctggatcacctcctt

SEQ ID NO: 1810 - DNA, 1395 bp, Streptococcus lutetiensis
  modified_base (1383)..(1383): a, c, t, g, unknown or other
gaagactttagcttgctaaagttggaagagttgcgaacgggtgagtaacgcgtaggtaacctgcctactagcgggggataactattggaaacgatagctaataccgcataacagcatttaacccatgttagatgcttgaaaggagcaattgcttcactagtagatggacctgcgttgtattagctagttggtgaggtaacggctcaccaaggcgacgatacatagccgacctgagagggtgatcggccacactgggactgagacacggcccagactcctacgggaggcagcagtagggaatcttcggcaatgggggcaaccctgaccgagcaacgccgcgtgagtgaagaaggttttcggatcgtaaagctctgttgtaagagaagaacgtgtgtgagagtggaaagttcacacagtgacggtaacttaccagaaagggacggctaactacgtgccagcagccgcggtaatacgtaggtcccgagcgttgtccggatttattgggcgtaaagcgagcgcaggcggtttaataagtctgaagttaaaggcagtggcttaaccattgttcgctttggaaactgttagacttgagtgcagaaggggagagtggaattccatgtgtagcggtgaaatgcgtagatatatggaggaacaccggtggcgaaagcggctctctggtctgtaactgacgctgaggctcgaaagcgtggggagcaaacaggattagataccctggtagtccacgccgtaaacgatgagtgctaggtgttaggccctttccggggcttagtgccgcagctaacgcattaagcactccgcctggggagtacgaccgcaaggttgaaactcaaaggaattgacgggggcccgcacaagcggtggagcatgtggtttaattcgaagcaacgcgaagaaccttaccaggtcttgacatcccgatgctattcctagagataggaagtttcttcggaactgtgagacttgagggcagaagggtagagtgcacttgtatggggagctgtggaatgcgttcccgcaacgagcgcaacccctattgttagttgccatcattaagttgggcactctagcgagactgccggtaataaaccggaggaaggtggggatgacgtcaaatcatcatgccccttatgacctgggctacacacgtgctacaatggttggtacaacgagtcgcgagtcggtgacggcaagcaaatctcttaaagccaatctcagttcggattgtaggctgcaactcgcctacatgaagtcggaatcgctagtaatcgcggatcagcacgccgcggtgaatacgttcccgggccttgtacacaccgcccgtcacaccacgagagtttgtaacacccgaagtcggtgaggtanccttttaggagc

SEQ ID NO: 1811 - DNA, 1470 bp, Streptococcus massiliensis
gatgaacgctggcggcgtgcctaatacatgcaagtagaacgcagaggattggtgcttgcactaatctaatgagttgcgaacgggtgagtaacgcgtaggtaacctgcctggtagcgggggataactattggaaacgatagctaataccgcataatagtttatgactcatgttataaacttgaaagatacaactgtatcactaccagatggacctgcgttgtattagctagtaggtagggtaacggcctacctaggcgacgatacatagccgacctgagagggtgatcggccacactgggactgagacacggcccagactcctacgggaggcagcagtagggaatcttcggcaatggggggaaccctgaccgagcaacgccgcgtgagtgaagaaggttttcggatcgtaaagctctgttgttaaggaagaacgggagtaggagtggaaagcctactttgtgacggtacttaaccagaaagggacggctaactacgtgccagcagccgcggtaatacgtaggtcccgagcgttatccggatttattgggcgtaaagcgagcgcaggcggttagataagtctggagtaaaaggctatggctcaaccatagtgtgctctggaaactgtttaacttgagtgcagaaggggagagtggaattccatgtgtagcggtgaaatgcgtagatatatggaggaacaccggtggcgaaagcggctctctggtctgtaactgacgctgaggctcgaaagcgtggggagcgaacaggattagataccctggtagtccacgccgtaaacgatgagtgctaggtgttaggccctttccggggcttagtgccgtagctaacgcaataagcactccgcctggggagtacgaccgcaaggttgaaactcaaaggaattgacgggggcccgcacaagcggtggagcatgtggtttaattcgaagcaacgcgaagaaccttaccaggtcttgacatcccgatgcccgtcctagagataggattttacttcggtacatcggtgacaggtggtgcatggttgtcgtcagctcgtgtcgtgagatgttgggttaagtcccgcaacgagcgcaacccttattgttagttgccatcattgagttgggcactctagcgagactgccggtaataaaccggaggaaggtggggatgacgtcaaatcatcatgccccttatgacctgggctacacacgtgctacaatggctggtacaacgagtcgcaagtcggtgacgacaagctaatctctgaaagccagtctcagttcggattgtaggctgcaactcgcctacatgaagtcggaatcgctagtaatcgcggatcagcacgccgcggtgaatacgttcccgggccttgtacacaccgcccgtcacaccacgagagtttgtaacacccgaagtcggtgaggtaaccgtaaggagccagccgcctaaggtgggatagatgattggggtg

SEQ ID NO: 1812 - DNA, 945 bp, Streptococcus milleri
  modified_base (934)..(934): a, c, t, g, unknown or other
gtctataccgtagcttgctacaccataggctgtgagttgcgaacgggtgagtaacgcgtaggtaacctgcctattagagggggataactattggaaacgatagctaataccgcataacagtatgtaacacatgttagatgcttgaaagatgcaattgcatcgctagtagatggacctgcgttgtattagctagtaggtagggtaatggcctacctaggcaacgatacatagccgacctgagagggtgatcggccacactgggactgagacacggcccagactcctacgggaggcagcagtagggaatcttcggcaatggggggaaccctgaccgagcaacgccgcgtgagtgaagaaggttttcggatcgtaaagctctgttgttaaggaagaacgagtgtgagaatggaaagttcatactgtgacggtacttaaccagaaagggacggctaactacgtgccagcagccgcggtaatacgtaggtcccgagcgttgtccggatttattgggcgtaaagcgagcgcaggcggttagaaaagtctgaagtgaaaggcagtggctcaaccattgtaggctttggaaactgtttaacttgagtgcagaaggggagagtggaattccatgtgtagcggtgaaatgcgtagatatatggaggaacaccggtggcgaaagcggctctctggtctgtaactgacgctgaggctcgaaagcgtggggagcgaacaggattagataccctggtagtccacgccgtaaacgatgagtgctaggtgttaggtcctttccgggacttagtgccgcagctaacgcattaagcactccgcctggggagtacgaccgcaaggttgaaactcaaaggaattgacgggggcccgcacaagcggtggagcatgtggtttaattcgaagcaacgcgaagaaccttaccaggtcntgacatcccag

SEQ ID NO: 1813 - DNA, 976 bp, Streptococcus mitis
  modified_base (47)..(47): a, c, t, g, unknown or other
  modified_base (135)..(136): a, c, t, g, unknown or other
  modified_base (143)..(143): a, c, t, g, unknown or other
  modified_base (154)..(154): a, c, t, g, unknown or other
  modified_base (244)..(244): a, c, t, g, unknown or other
ggaaagttcacactgtgacggtatcttaccagaaagggacggctaantacgtgccagcagccgcggtaatacgtaggtcccgagcgttgtccggatttattgggcgtaaagcgagcgcaggcggttagataagtnngaagttnaaggctgtggnttaaccatagtacgctttggaaactgtttaacttgagtgcaagaggggagagtggaattccatgtgtagcggtgaaatgcgtagatatanggaggaacaccggtggcgaaagcggctctctggcttgtaactgacgctgaggctcgaaagcgtggggagcaaacaggattagataccctggtagtccacgccgtaaacgatgagtgctaggtgttagaccctttccggggtttagtgccgcagctaacgcattaagcactccgcctggggagtacgaccgcaaggttgaaactcaaaggaattgacgggggcccgcacaagcggtggagcatgtggtttaattcgaagcaacgcgaagaaccttaccaggtcttgacatccctctgaccgctctagagatagagttttccttcgggacagaggtgacaggtggtgcatggttgtcgtcagctcgtgtcgtgagatgttgggttaagtcccgcaacgagcgcaacccctattgttagttgccatcatttagttgggcactctagcgagactgccggtaataaaccggaggaaggtggggatgacgtcaaatcatcatgccccttatgacctgggctacacacgtgctacaatggctggtacaacgagtcgcaagccggtgacggcaagctaatctcttaaagccagtctcagttcggattgtaggctgcaactcgcctacatgaagtcggaatcgctagtaatcgcggatcagcacgccgcggtgaatacgttcccgggccttgtacacaccgcccgtcacaccacgagagtttgtaacacccgaagtcggtg

SEQ ID NO: 1814 - DNA, 971 bp, Streptococcus mutans
  modified_base (950)..(950): a, c, t, g, unknown or other
agaacacactgtgcttgcacaccgtgttttcttgagtcgcgaacgggtgagtaacgcgtaggtaacctgcctattagcgggggataactattggaaacgatagctaataccgcataatattaattattgcatgataattgattgaaagatgcaagcgcatcactagtagatggacctgcgttgtattagctagttggtaaggtaagagcttaccaaggcgacgatacatagccgacctgagagggtgatcggccacactgggactgagacacggcccagactcctacgggaggcagcagtagggaatcttcggcaatggacgaaagtctgaccgagcaacgccgcgtgagtgaagaaggttttcggatcgtaaagctctgttgtaagtcaagaacgtgtgtgagagtggaaagttcacacagtgacggtagcttaccagaaagggacggctaactacgtgccagcagccgcggtaatacgtaggtcccgagcgttgtccggatttattgggcgtaaagggagcgcaggcggtcaggaaagtctggagtaaaaggctatggctcaaccatagtgtgctctggaaactgtctgacttgagtgcagaaggggagagtggaattccatgtgtagcggtgaaatgcgtagatatatggaggaacaccagtggcgaaagcggctctctggtctgtcactgacgctgaggctcgaaagcgtgggtagcgaacaggattagataccctggtagtccacgccgtaaacgatgagtgctaggtgttaggccctttccggggcttagtgccggagctaacgcaataagcactccgcctggggagtacgaccgcaaggttgaaactcaaaggaattgacgggggcccgcacaagcggtggagcatgtggtttaattcgaagcaacgcgaagaaccttaccaggtcttgacatcccgatgctnttcttagagataggaagttac

SEQ ID NO: 1815 - DNA, 1510 bp, Streptococcus oligofermentans
cggcgtgcctaatacatgcaagtagaacgctgaaggaaggagcttgctctttccggaagagttgcgaacgggtgagtaacgcgtaggtaacctaccttttagcgggggataactattggaaacgatagctaataccgcataagacattttactgcatggtaagatgttaaaagatgcaaatgcatcactaagagatggacctgcgttgtattagctagtaggtgaggtaacggctcacctaggcgacgatacatagccgacctgagagggtgatcggccacactgggactgagacacggcccagactcctacgggaggcagcagtagggaatcttcggcaatggacggaagtctgaccgagcaacgccgcgtgagtgaagaaggttttcggatcgtaaagctctgttgtaagagaagaacgagtgtgagagtggaaagttcacactgtgacggtaacttaccagaaagggacggctaactacgtgccagcagccgcggtaatacgtaggtcccgagcgttgtccggatttattgggcgtaaagcgagcgcaggcggttagataagtctgaagttaaaggctgtggcttaaccatagtacgctttggaaactgtttaacttgagtgcagaaggggagagtggaattccatgtgtagcggtgaaatgcgtagatatatggaggaacaccggtggcgaaagcggctctctggtctgtaactgacgctgaggctcgaaagcgtggggagcaaacaggattagataccctggtagtccacgccgtaaacgatgagtgctaggtgttgggtcctttccgggactcagtgccgtagctaacgcattaagcactccgcctggggagtacgaccgcaaggttgaaactcaaaggaattgacgggggcccgcacaagcggtggagcatgtggtttaattcgaagcaacgcgaagaaccttaccaggtcttgacatcccggtgcccgtcctagagataggattttgcttcggcacaccggtgacaggtggtgcatggttgtcgtcagctcgtgtcgtgagatgttgggttaagtcccgcaacgagcgcaacccttattgttagttgccatcattcagttgggcactctagcgagactgccggtaataaaccggaggaaggtggggatgacgtcaaatcatcatgccccttatgacctgggctacacacgtgctacaatggctggtacaacgagtcgcaagtcggtgacggcaagctaatctcttaaagccagtctcagttcggattgtaggctgcaactcgcctacatgaagtcggaatcgctagtaatcgcggatcagcacgccgcggtgaatacgttcccgggccttgtacacaccgcccgtcacaccacgagagtttgtaacacccgaagtcggtgaggtaaccttttaggagccagccgcctaaggtgggatagatgattggggtgaagtcgtaacaaggtagccgtatcggaaggtgcggctggatcaccttctta

SEQ ID NO: 1816 - DNA, 801 bp, Streptococcus oralis
  modified_base (507)..(507): a, c, t, g, unknown or other
  modified_base (520)..(520): a, c, t, g, unknown or other
  modified_base (551)..(551): a, c, t, g, unknown or other
  modified_base (591)..(591): a, c, t, g, unknown or other
  modified_base (625)..(625): a, c, t, g, unknown or other
  modified_base (682)..(682): a, c, t, g, unknown or other
  modified_base (696)..(697): a, c, t, g, unknown or other
  modified_base (713)..(713): a, c, t, g, unknown or other
  modified_base (737)..(737): a, c, t, g, unknown or other
  modified_base (751)..(751): a, c, t, g, unknown or other
  modified_base (784)..(784): a, c, t, g, unknown or other
tgcttctctggatgagttgcgaacgggtgagtaacgcgtaggtaacctgcctggtagcgggggataactattggaaacgatagctaataccgcataagattgattattgcatgatagtcaattaaaaggtgcaattgcatcactaccagatggacctgcgttgtattagctagttggtgaggtaacggctcaccaaggcaacgatacataaccgacctgagagggtgatcggccacactgggactgagacacggcccaaactcctacgggaggcagcagtagggaatcttcggcaatggacggaagtctgaccgagcaacgccgcgtgagtgaagaaggttttcggatcgtaaagctctgttgtaagagaagaacgagtgtgagagtggaaagttcacactgtgacggtatcttaccataaagggacggctaactacgtgccagcagccgcggtaatacgtaggtcccgagcgttgtccggatttattgggcgtaaagcgagcgcangcggttagataantctgaagttaaaggctgtggcttaaccatantacgctttggaaactgtttaacttgagtgcaagagggganagtggaattccatgtgtagcggtgaaatgcgtanatatatggaggaacaccggtggcgaaagcggctctctggcttgtaactgacgctgangctcgaaagcgtgnngagcaaacaggattanataccctggtagtccacgccgtanacgatgagtgctangtgttagaccctttccggggtttagtgccgcanctaacgcattaagcact

SEQ ID NO: 1817 - DNA, 1393 bp, Streptococcus parasanguinis
  modified_base (1384)..(1384): a, c, t, g, unknown or other
gctgaagcttggtgcttgcaccgagcggaagagttgcgaacgggtgagtaacgcgtaggtaacctgcctcttagcgggggataactattggaaacgatagctaataccgcataaaagtcgacattgcatgatgttgacttgaaaggtgcaactgcaccactaagagatggacctgcgttgtattagctagttggtgaggtaacggctcaccaaggcgacgatacatagccgacctgagagggtgatcggccacactgggactgagacacggcccagactcctacgggaggcagcagtagggaatcttcggcaatggacggaagtctgaccgagcaacgccgcgtgagtgaagaaggttttcggatcgtaaagctctgttgtaagagaagaacgagtgtgagagtggaaagttcacactgtgacggtaacttaccagaaagggacggctaactacgtgccagcagccgcggtaatacgtaggtccgagcgttatccggatttattgggcgtaaagcgagcgcaggcggttagataagtctgaagttaaaggctgtggcttaaccatagtacgctttggaaactgtttaacttgagtgcagaaggggagagtggaattccatgtgtagcggtgaaatgcgtagatatatggaggaacaccggtggcgaaagcggctctctggtctgtaactgacgctgaggctcgaaagcgtggggagcaaacaggattagataccctggtagtcacgccgtaaacgatgagtgctaggtgttgggtcctttccgggactcagtgccgcagctaacgcattaagcactccgcctggggagtacgaccgcaaggttgaaactcaaaggaattgacgggggcccgcacaagcggtggagcatgtggtttaattcgaagcaacgcgaagaaccttacccggtcttgacatccctctgaccgctctagagatagagctttccttcgggacagaggtgacaggtggtgcatggttgtcgtcagctcgtgtcgtgagatgttgggttaagtcccgcaacgagcgcaacccctattgttagttgccatcatttagttgggcactctagcgagactgccggtaataaaccggaggaaggtggggatgacgtcaaatcatcatgccccttatgacctgggctacacacgtgctacaatggctggtacaacgagtcgcgagtcggtgacggcaagctaatctcttaaagccagtctcagttcggattgtaggctgcaactcgcctacatgaagtcggaatcgctagtaatcgcggatcagcacgccgcggtgaatacgttcccgggccttgtacacaccgcccgtcacaccacgagagtttgtaacacccgaagtcggtgaggtanccttttagg

SEQ ID NO: 1818 - DNA, 1372 bp, Streptococcus pasteurianus
gaaatggagtttgatcctggctcaggacgaacgctggcggcgtgcctaatacatgcaagtagaacgagttgcgaacgggtgagtaacgcgtaggtaacctgcctactagcgggggataactattggaaacgatagctaataccgcataacgaaagtcactagtagatggacctgcgttgtattagctagttggtggggtaacggcccaccaaggcgacgatacatagccgacctgagagggtgatcggccacactgggactgagacacggcccagactcctacgggaggcagcagtagggaatcttcggcaatgggggcaaccctgaccgagcaacgccgcgtgagtgaagaaggttttcggatcgtaaagctctgttgtaagagaagatgacggtaacttaccagaaagggacggctaactacgtgccagcagccgcggtaatacgtaggtcccgagcgttgtccggatttattgggcgtaaagcgagcgcaggcggtttaataagtctgaagttaaaggcagtggcttaaccattgttcgctttggaaactgttaaacttgagtgcagaaggggagagtggaattccatgtgtagcggtgaaatgcgtagatatatggaggaacaccggtggcgaaagcggctctctggtctgactgacgctgaggctcgaaagcgtggggagcaaacaggattagataccctggtagtccacgccgtaaacgatgagtgctaggtgttaggcgcttagtgccgcagctaacgcattaagcactccgcctggggagtacgaccgcaaggttgaaactcaaaggaattgacgggggcccgcacaagcggtggagcatgtggtttaattcgaagcaacgcgaagaaccttaccaggtcttgacatcgacaggtggtgcatggttgtcgtcagctcgtgtcgtgagatgttgggttaagtcccgcaacgagcgcaacccctattgttagttgccatcatgggcactctagcgagactgccggtaataaaccggaggaaggtggggatgacgtcaaatcatcatgccccttatgacctgggctacacacgtgctacaatggttggcaacgagtcgcaagtcggtgacggcaagcaaatctcttccaatctcagttcggatgtaggctgcaactcgcctacagaagtcggaatcgctagtaatcgcggatcagcacgccgcggtgaatacgttcccgggccttgtacacaccgcccgtcacaccacgagagtttgtaacacccgaagtcggtaggtagccagccgcctaaggtgggatagatgattggggtgaagtcgtaacaaggtagccgtatcggaaggtgcggctggatcacctcctttct

SEQ ID NO: 1819 - DNA, 1543 bp, Streptococcus peroris
tgagagtttgatcctggctcaggatgaacgctggcggcgtgcctaatacatgcaagtagaacgctgaaggaggagcttgcttctctggatgagttgcgaacgggtgagtaacgcgtaggtaacctgcctggtagcgggggataactattggaaacgatagctaataccgcataagagcagttgttgcatgacagctgtttaaaaggtgcaattgcaccactaccagatggacctgcgttgtattagctagttggtgaggtaacggctcaccaaggcgacgatacatagccgacctgagagggtgatcggccacactgggactgagacacggcccagactcctacgggaggcagcagtagggaatcttcggcaatgggggcaaccctgaccgagcaacgccgcgtgagtgaagaaggttttcggatcgtaaagctctgttgtaagagaagaacgagtgtgagagtggaaagttcacgctgtgacggtatcttaccagaaagggacggctaactacgtgccagcagccgcggtaatacgtaggtcccgagcgttatccggatttattgggcgtaaagcgagcgcaggcggttagataagtctgaagttaaaggctgtggcttaaccatagtacgctttggaaactgtttaacttgagtgcaagaggggagagtggaattccatgtgtagcggtgaaatgcgtagatatatggaggaacaccggtggcgaaagcggctctctggcttgtaactgacgctgaggctcgaaagcgtggggagcaaacaggattagataccctggtagtccacgccgtaaacgatgagtgctaggtgttagaccctttccggggtttagtgccgcagctaacgcattaagcactccgcctggggagtacgaccgcaaggttgaaactcaaaggaattgacgggggcccgcacaagcggtggagcatgtggtttaattcgaagcaacgcgaagaaccttaccaggtcttgacatcccgatgccatttctagagataggaagttacttcggtacatcggtgacaggtggtgcatggttgtcgtcagctcgtgtcgtgagatgttgggttaagtcccgcaacgagcgcaacccctattgttagttgccatcattcagttgggcactctagcgagactgccggtaataaaccggaggaaggtggggatgacgtcaaatcatcatgccccttatgacctgggctacacacgtgctacaatggctggtacaacgagtcgcgagtcggtgacggcaagctaatctcttaaagccagtctcagttcggattgtaggctgcaactcgcctacatgaagtcggaatcgctagtaatcgcggatcagcacgccgcggtgaatacgttcccgggccttgtacacaccgcccgtcacaccacgagagtttgtaacacccgaagtcggtgaggtaaccatttggagccagccgcctaaggtgggatagatgattggggtgaagtcgtaacaaggtagccgtatcggaaggtgcggctggatcacctcctttct

SEQ ID NO: 1820 - DNA, 1365 bp, Streptococcus pneumoniae
agcttgcttctccggatgagttgcgaacgggtgagtaacgcgtaggtaacctgcctggtagcgggggataactattggaaacgatagctaataccgcataagagtagatgttgcatgacatttgcttaaaaggtgcaattgcatcactaccagatggacctgcgttgtattagctagttggtggggtaacggctcaccaaggcgacgatacatagccgacctgagagggtgatcggccacactgggactgagacacggcccagactcctacgggaggcagcagtagggaatcttcggcaatggacggaagtctgaccgagcaacgccgcgtgagtgaagaaggttttcggatcgtaaagctctgttgtaagagaagaacgagtgtgagagtggaaagttcacactgtgacggtatcttaccagaaagggacggctaactacgtgccagcagccgcggtaatacgtaggtcccgagcgttgtccggatttattgggcgtaaagcgagcgcaggcggttagataagtctgaagttaaggctgtggcttaaccatagtacgctttggaaactgtttaacttgagtgcaagaggggagagtggaattccatgtgtagcggtgaaatgcgtagatataggaggaacaccggtggcgaaagcggctctctggcttgtaactgacgctgaggctcgaaagcgtggggagcaaacaggattagataccctggtagtccacgccgtaaacgatgagtgctaggtgttagaccctttccggggtttagtgccgcagctaacgcattaagcactccgcctggggagtacgaccgcaaggttgaaactcaaaggaattgacgggggcccgcacaagcggtggagcatgtggtttaattcgaagcgacgcgaagaaccttaccaggtcttgacttccctctgaccgctctagagatagagttttccttcgggacagaggtgacaggtggtgcatggttgtcgtcagctcgtgtcgtgagatgttgggttaagtcccgcaacgagcgcaacccctattgttagttgccatcatttagttgggcactctagcgagactgccggtaataaaccggaggaaggtggggatgacgtcaaatcatcatgccccttatgacctgggctacacacgtgctacaatggctggtacaacgagtcgcaagccggtgacggcaagctaatctcttaaagccagtctcagttcggattgtaggctgcaactcgcctacatgaagtcggaatcgctagtaatcgcggatcagcacgccgcggtgaatacgttcccgggccttgtacacaccgcccgtcacaccacgagagtttgtaacacccgaagtcggtg

SEQ ID NO: 1821 - DNA, 1445 bp, Streptococcus porcinus
cgctggcggcgtgcctaatacatgcaagtagaacgcagaggacaggtgcttgcaccagtctaatgagttgcgaacgggtgagtaacgcgtaggtaacctaccttatagcgggggataactattggaaacgatagctaataccgcatgaaagtagaagacacatgtcatctacttaaaaggggcaaatgctctactatgagatggacctgcgttgtattagctagttggtgaggtaaaggctcaccaaggcgacgatacatagccgacctgagagggtgatcggccacactgggactgagacacggcccagactcctacgggaggcagcagtagggaatcttcggcaatggggggaaccctgaccgagcaacgccgcgtgagtgaagaaggttttcggatcgtaaagctctgttgttagagaagaacggtaatgggagtggaaaatccattacgtgacggtaactaaccagaaagggacggctaactacgtgccagcagccgcggtaatacgtaggtcccgagcgttgtccggatttattgggcgtaaagcgagcgcaggcggtttgataagtctgaagttaaaggctgtggcttaaccatagttcgctttggaaactgtcaaacttgagtgcagaaggggagagtggaattccatgtgtagcggtgaaatgcgtagatatatggaggaacaccggtggcgaaagcggctctctggtctgtaactgacgctgaggctcgaaagcgtggggagcaaacaggattagataccctggtagtccacgccgtaaacgatgagtgctaggtgttaggccctttccggggcttagtgccggagctaacgcattaagcactccgcctggggagtacgaccgcaaggttgaaactcaaaggaattgacgggggcccgcacaagcggtggagcatgtggtttaattcgaagcaacgcgaagaaccttaccaggtcttgacatccttctgaccgtcctagagataggatttcccttcggggcaggagtgacaggtggtgcatggttgtcgtcagctcgtgtcgtgagatgttgggttaagtcccgcaacgagcgcaacccctattgttagttgccatcattaagttgggcactctagcgagactgccggtaataaaccggaggaaggtggggatgacgtcaaatcatcatgccccttatgacctgggctacacacgtgctacaatggttggtacaacgagtcgcaagccggtgacggcaagctaatctcttaaagccaatctcagttcggattgtaggctgcaactcgcctacatgaagtcggaatcgctagtaatcgcggatcagcacgccgcggtgaatacgttcccgggccttgtacacaccgcccgtcacaccacgagagtttgtaacacccgaagtcggtgaggtaaccatttaggagccagccgcctaagg

SEQ ID NO: 1822 - DNA, 1376 bp, Streptococcus pseudopneumoniae
tgcaagtagaacgctgaaggaggagcttgcttctctggatgagttgcgaacgggtgagtaacgcgtaggtaacctgcctggtagcgggggataactattggaaacgatagctaataccgcataagagtagatgttgcatgacatttrcttaaaaggtgcaattgcatcactaccagatggacctgcgttgtattagctagttggtggggtaacggctcaccaaggcgacgatacatagccgacctgagagggtgatcggccacactgggactgagacacggcccagactcctacgggaggcagcagtagggaatcttcggcaatggacggaagtctgaccgagcaacgccgcgtgagtgaagaaggttttcggatcgtaaagctctgttgtaagagaagaacgagtgtgagagtggaaagttcacactgtgacggtatcttaccagaaagggacggctaactacgtgccagcagccgcggtaatacgtaggtcccgagcgttgtscggawttattgggcgtaaagcgagcgcaggcggttagataagtctgaagttaaaggctgtggcttaaccatagtaggctttggaaactgtttaacttgagtgcaagaggggagagtggaattccatgtgtagcggtgaaatgcgtagatatatggaggaacaccggtggcgaaagcggctctctggcttgtaactgacgctgaggctcgaaagcgtggggagcaaacaggattagataccctggtagtccacgccgtaaacgatgagtgctaggtgttagaccctttccggggtttagtgccgtagctaacgcattaagcactccgcctggggagtacgaccgcaaggttgaaactcaaaggaattgacgggggcccgcacaagcggtggagcatgtggtttaattcgaagcaacgcgaagaaccttaccaggtcttgacatccctctgaccgctctagagatagagctttccttcgggacagaggtgacaggtggtgcatggttgtcgtcagctcgtgtcgtgagatgttgggttaagtcccgcaacgagcgcaacccctattgttagttgccatcattcagttgggcactctagcgagactgccggtaataaaccggaggaaggtggggatgacgtcaaatcatcatgccccttatgacctgggctacacacgtgctacaatggctggtacaacgagtcgcaagccggtgacggcaagctaatctcttaaagccagtctcagttcggattgtaggctgcaactcgcctacatgaagtcggaatcgctagtaatcgcggatcagcacgccgcggtgaatacgttcccgggccttgtacacaccgcccgtcacaccacgagagtttgtaac

SEQ ID NO: 1823 - DNA, 1545 bp, Streptococcus pseudoporcinus
gagagtttgatcctggctcaggacgaacgctggcggcgtgcctaatacatgcaagtagaacgctgaggtctggtgcttgcactagaccaaggagttgcgaacgggtgagtaacgcgtaggtaacctacctcatagcgggggataactattggaaacgatagctaataccgcatgagactggggttcacatgaacccgagttaaaaggagcaaaagcttcactatgagatggacctgcgttgtattagctagttggtgaggtaaaggctcaccaaggcgacgatacatagccgacctgagagggtgatcggccacactgggactgagacacggcccagactcctacgggaggcagcagtagggaatcttcggcaatggggggaaccctgaccgagcaacgccgcgtgagtgaagaaggttttcggatcgtaaagctctgttgttagagaagaacggtaatgggagtggaaaatccattatgtgacggtaactaaccagaaagggacggctaactacgtgccagcagccgcggtaatacgtaggtcccgagcgttgtccggatttattgggcgtaaagcgagcgcaggcggtttgataagtctgaagttaaaggctgtggcttaaccatagtatgctttggaaactgtcaaacttgagtgcagaaggggagagtggaattccatgtgtagcggtgaaatgcgtagatatatggaggaacaccggtggcgaaagcggctctctggtctgtaactgacgctgaggctcgaaagcgtggggagcaaacaggattagataccctggtagtccacgccgtaaacgatgagtgctaggtgttaggccctttccggggcttagtgccggagctaacgcattaagcactccgcctggggagtacgaccgcaaggttgaaactcaaaggaattgacgggggcccgcacaagcggtggagcatgtggtttaattcgaagcaacgcgaagaaccttaccaggtcttgacatccttctgaccggcctagagataggctttctcttaggagcagaagagacaggtggtgcatggttgtcgtcagctcgtgtcgtgagatgttgggttaagtcccgcaacgagcgcaacccctattgttagttgccatcattaagttgggcactctagcgagactgccggtaataaaccggaggaaggtggggatgacgtcaaatcatcatgccccttatgacctgggctacacacgtgctacaatggttggtacaacgagtcgcaagccggtgacggcaagctaatctcttaaagccaatctcagttcggattgtaggctgcaactcgcctacatgaagtcggaatcgctagtaatcgcggatcagcacgccgcggtgaatacgttcccgggccttgtacacaccgcccgtcacaccacgagagtttgtaacacccgaagtcggtgaggtaaccttttaggagccagccgcctaaggtgggatagatgattggggtgaagtcgtaacaaggtagccgtatcggaaggtgcggctggatcacctcctttct

SEQ ID NO: 1824 - DNA, 1547 bp, Streptococcus pyogenes
gagagtttgatcctggctcaggacgaacgctggcggcgtgcctaatacatgcaagtagaacgctgagaactggtgcttgcaccggttcaaggagttgcgaacgggtgagtaacgcgtaggtaacctacctcatagcgggggataactattggaaacgatagctaataccgcataagagagactaacgcatgttagtaatttaaaaggggcaattgctccactatgagatggacctgcgttgtattagctagttggtgaggtaaaggctcaccaaggcgacgatacatagccgacctgagagggtgatcggccacactgggactgagacacggcccagactcctacgggaggcagcagtagggaatcttcggcaatgggggcaaccctgaccgagcaacgccgcgtgagtgaaagaaggttttcggatcgtaaagctctgttgttagagaagaatgatggtgggagtggaaaatccaccaagtgacggtaactaaccagaaagggacggctaactacgtgccagcagccgcggtaatacgtaggtcccgagcgttgtccggatttattgggcgtaaagcgagcgcaggcggttttttaagtctgaagttaaaggcattggctcaaccaatgtacgctttggaaactggagaacttgagtgcagaaggggagagtggaattccatgtgtagcggtgaaatgcgtagatatatggaggaacaccggtggcgaaagcggctctctggtctgtaactgacgctgaggctcgaaagcgtggggagcaaacaggattagataccctggtagtccacgccgtaaacgatgagtgctaggtgttaggccctttccggggcttagtgccggagctaacgcattaagcactccgcctggggagtacgaccgcaaggttgaaactcaaaggaattgacgggggcccgcacaagcggtggagcatgtggtttaattcgaagcaacgcgaagaaccttaccaggtcttgacatcccgatgcccgctctagagatagagttttacttcggtacatcggtgacaggtggtgcatggttgtcgtcagctcgtgtcgtgagatgttgggttaagtcccgcaacgagcgcaacccctattgttagttgccatcattaagttgggcactctagcgagactgccggtaataaaccggaggaaggtggggatgacgtcaaatcatcatgccccttatgacctgggctacacacgtgctacaatggttggtacaacgagtcgcaagccggtgacggcaagctaatctcttaaagccaatctcagttcggattgtaggctgcaactcgcctacatgaagtcggaatcgctagtaatcgcggatcagcacgccgcggtgaatacgttcccgggccttgtacacaccgcccgtcacaccacgagagtttgtaacacccgaagtcggtgaggtaacctattaggagccagccgcctaaggtgggatagatgattggggtgaagtcgtaacaaggtagccgtatcggaaggtgcggctggatcacctcctttcta

SEQ ID NO: 1825 - DNA, 1334 bp, Streptococcus ratti
  modified_base (66)..(66): a, c, t, g, unknown or other
  modified_base (85)..(85): a, c, t, g, unknown or other
  modified_base (138)..(138): a, c, t, g, unknown or other
  modified_base (142)..(142): a, c, t, g, unknown or other
  modified_base (207)..(207): a, c, t, g, unknown or other
  modified_base (240)..(240): a, c, t, g, unknown or other
  modified_base (260)..(261): a, c, t, g, unknown or other
  modified_base (282)..(284): a, c, t, g, unknown or other
  modified_base (449)..(449): a, c, t, g, unknown or other
  modified_base (475)..(475): a, c, t, g, unknown or other
  modified_base (493)..(493): a, c, t, g, unknown or other
  modified_base (523)..(523): a, c, t, g, unknown or other
  modified_base (842)..(843): a, c, t, g, unknown or other
  modified_base (855)..(855): a, c, t, g, unknown or other
  modified_base (926)..(926): a, c, t, g, unknown or other
  modified_base (954)..(954): a, c, t, g, unknown or other
  modified_base (956)..(956): a, c, t, g, unknown or other
  modified_base (1018)..(1018): a, c, t, g, unknown or other
  modified_base (1070)..(1070): a, c, t, g, unknown or other
  modified_base (1121)..(1121): a, c, t, g, unknown or other
  modified_base (1295)..(1295): a, c, t, g, unknown or other
  modified_base (1304)..(1304): a, c, t, g, unknown or other
gaacgggtgagtaacgcgtaggtaacctgcctattagcgggggataactattggaaacgatagctnataccgcataagagagttnaacacatgttagacgcttgaaagatgcaagagcatcactagtagatggacctncgtngtattagctagtaggtagggtaaaggcctacctaggcgacgatacatagccgacctgagagggtnaccggccacactgggactgagacacggcccagnctcctacgggaggcagcagnngggaatcttcggcaatggggnnnaccctgaccgagcaacgccgcgtgagtgaagaaggttttcggatcgtaaagctctgttgtcagagacgaacgtgtgtgagagtggaaagttcacacagtgacggtaactgaccagaaagggacggctaactacgtgccagcagccgcggtaatacgtaggtcccnagcgttgtccggatttattgggcgtnaagcgagcgcaggcggtnttgtaagtctgaagtcaaaggcagtggctnaaccattgtgtgctttggaaactgcaggacttgagtgcagaaggggagagtggaattccatgtgtagcggtgaaatgcgtagatatatggaggaacaccggtggcgaaagcggctctctggtctgtaactgacgctgaggctcgaaagcgtgggtagcgaacaggattagataccctggtagtccacgccgtaaacgctgagtgctaggtgttaggccctttccggggcttagtgccggagctaacgcattaagcactccgcctggggagtacgaccgcaaggttgaaactcaaaggaattgacgggggccgcacaagnngtggagcatgtngtttaattcgaagcaacgcgaagaaccttaccaggtcttgacatcccgatgcccgctctagagatagagtnttactttcgtacatcggtgacaggtggngnatggttgtcgtcagctcgtgtcgtgagatgttgggttaagtcccgcaacgagcgcaaccctnattgttagttgccatcattgagttgggcactctagcgagactgccggtaatnaaccggaggaaggtggggatgacgtcaaatcatcatgccccttatgacctnggctacacacgtgctacaatggtcggtacaacgagtcgcgagccggtgacggcaagctaatctctgaaagccgatctcagttcggattggaggctgcaactcgcctccatgaagtcggaatcgctagtaatcgcggatcagcacgccgcggtgaatacgttcccgggccttgtncacaccgcncgtcacaccacgagagtttgtaacacccga

SEQ ID NO: 1826 - DNA, 1012 bp, Streptococcus salvarius
  modified_base (998)..(998): a, c, t, g, unknown or other
  modified_base (1005)..(1006): a, c, t, g, unknown or other
tagaacgctgaagagaggagcttgctcttcttggatgagttgcgaacgggtgagtaacgcgtaggtaacctgccttgtagcgggggataactattggaaacgatagctaataccgcataacaatggatgacacatgtcatttatttgaaaggggcaattgctccactacaagatggacctgcgttgtattagctagtaggtgaggtaacggctcacctaggcgacgatacatagccgacctgagagggtgatcggccacactgggactgagacacggcccagactcctacgggaggcagcagtagggaatcttcggcaatgggggcaaccctgaccgagcaacgccgcgtgagtgaagaaggttttcggatcgtaaagctctgttgtaagtcaagaacgagtgtgagagtggaaagttcacactgtgacggtagcttaccagaaagggacggctaactacgtgccagcagccgcggtaatacgtaggtcccgagcgttgtccggatttattgggcgtaaagcgagcgcaggcggtttgataagtctgaagttaaaggctgtggctcaaccatagttcgctttggaaactgtcaaacttgagtgcagaaggggagagtggaattccatgtgtagcggtgaaatgcgtagatatatggaggaacaccggtggcgaaagcggctctctggtctgtaactgacgctgaggctcgaaagcgtggggagcgaacaggattagataccctggtagtccacgccgtaaacgatgagtgctaggtgttggatcctttccgggattcagtgccgcagctaacgcattaagcactccgcctggggagtacgaccgcaaggttgaaactcaaaggaattgacgggggcccgcacaagcggtggagcatgtggtttaattcgaagcaacgcgaagaaccttaccaggtcttgacatcccgatgctatttctagagatagaaagttacttcggtacatcggtgacaggtggngcatggnngtcgtc

SEQ ID NO: 1827 - DNA, 966 bp, Streptococcus sanguinis
  modified_base (47)..(48): a, c, t, g, unknown or other
  modified_base (700)..(700): a, c, t, g, unknown or other
  modified_base (714)..(714): a, c, t, g, unknown or other
  modified_base (721)..(721): a, c, t, g, unknown or other
  modified_base (799)..(799): a, c, t, g, unknown or other
  modified_base (855)..(855): a, c, t, g, unknown or other
  modified_base (917)..(917): a, c, t, g, unknown or other
  modified_base (920)..(920): a, c, t, g, unknown or other
  modified_base (930)..(930): a, c, t, g, unknown or other
  modified_base (955)..(955): a, c, t, g, unknown or other
cgctgaagagaggagcttgctcttcttggatgagttgcgaacgggtnngtaacgcgtaggtaacctgcctggtagcgggggataactattggaaacgatagctaataccgcatgaaattgcttatcgcatgataattaattgaaagatgcaactgcatcactaccagatggacctgcgttgtattagctagttggtgaggtaacggctcaccaaggcgacgatacatagccgacctgagagggtgatcggccacactgggactgagacacggcccagactcctacgggaggcagcagtagggaatcttcggcaatggggggaaccctgaccgagcaacgccgcgtgagtgaagaaggttttcggatcgtaaagctctgttgtaagagaagaacgggtgtgagagtggaaagttcacactgtgacggtatcttaccagaaagggacggctaactacgtgccagcagccgcggtaatacgtaggtcccgagcgttgtccggatttattgggcgtaaagcgagcgcaggcggttagataagtctgaagttaaaggctgtggcttaaccatagtatgctttggaaactgtttaacttgagtgcagaaggggagagtggaattccatgtgtagcggtgaaatgcgtagatatatggaggaacaccggtggcgaaagcggctctctggtctgtaactgacgctgangctcgaaagcgtgnggagcanacaggattagataccctggtagtccacgccgtaaacgatgagtgctaggtgttaggccctttccggggcttagtgccncagctaacgcattaagcactccgcctggggagtacgaccgcgaggttgaaactcanaggaattgacgggggcccgcacaagcggtggagcatgtggtttaattcgaagcaacgcgaanaancttaccaggncttgacatccctctgaccgctctanagatagagttt

SEQ ID NO: 1828 - DNA, 1510 bp, Streptococcus sinensis
agtttgatcctggctcaggacgaacgctggcggcgtgcctaatacatgcaagtggaacgcacaaggtgcaccgtagtttactacaccgtactttgtgagtcgcgaacgggtgagtaacgcgtaggtaacctaccttttagcgggggataactattggaaacgatagctaataccgcataagatatcttactgcatggtaagatattaaaagatgcaattgcatcactaagagatggacctgcgttgtattagctagtaggtgaggtaacggctcacctaggcaacgatacatagccgacctgagagggtgatcggccacactgggactgagacacggcccagactcctacgggaggcagcagtagggaatcttcggcaatggggggaaccctgaccgagcaacgccgcgtgagtgaagaaggttttcggatcgtaaagctctgttgtaagagaagaacgagtgtgagagtggaaagttcacactgtgacggtaacttaccagaaagggacggctaactacgtgccagcagccgcggtaatacgtaggtcccgagcgttgtccggatttattgggcgtaaagcgagcgcaggcggttagataagtctgaagttaaaggctgtggcttaaccatagtacgctttggaaactgtttaacttgagtgcagaaggggagagtggaattccatgtgtagcggtgaaatgcgtagatatatggaggaacaccggtggcgaaagcggctctctggtctgtaactgacgctgaggctcgaaagcgtggggagcaaacaggattagataccctggtagtccacgccgtaaacgatgagtgctaggtgttgggtcctttccgggactcagtgccgcagctaacgcattaagcactccgcctggggagtacgaccgcaaggttgaaactcaaaggaattgacgggggcccgcacaagcggtggagcatgtggtttaattcgaagcaacgcgaagaaccttaccaggtcttgacatcccggtgcccgtcctagagataggattttgcttcggcacaccggtgacaggtggtgcatggttgtcgtcagctcgtgtcgtgagatgttgggttaagtcccgcaacgagcgcaacccttattgttagttgccatcattcagttgggcactctagcgagactgccggtaataaaccggaggaaggtggggatgacgtcaaatcatcatgccccttatgacctgggctacacacgtgctacaatggctggtacaacgagtcgcaagtcggtgacggcaagctaatctcttaaagccagtctcagttcggattgtaggctgcaactcgcctacatgaagtcggaatcgctagtaatcgcggatcagcacgccgcggtgaatacgttcccgggccttgtacacaccgcccgtcacaccacgagagtttgtaacacccgaagtcggtgaggtaaccttttaggagccagccgcctaaggtgggatagatgattggggtgaagtcgtaacaag

SEQ ID NO: 1829 - DNA, 1478 bp, Streptococcus sp.
  16362
gacgaacgctggcggcgtgcctaatacatgcaagtaggacgcacagtctataccgtagcttgctacaccataggctgtgagttgcgaacgggtgagtaacgcgtaggtaacctgcctattagagggggataactattggaaacgatagctaataccgcataatagtatgtaacacatgttagatgcttgaaagatgcaattgcatcgctagtagatggacctgcgttgtattagctagtaggtagggtaaaggcctacctaggcaacgatacatagccgacctgagagggtgatcggccacactgggactgagacacggcccagactcctacgggaggcagcagtagggaatcttcggcaatggggggaaccctgaccgagcaacgccgcgtgagtgaagaaggttttcggatcgtaaagctctgttgttaaggaagaatgagtgtgagaatggaaagttcatactgtgacggtacttaaccagaaagggacggctaactacgtgccagcagccgcggtaatacgtaggtcccgagcgttgtccggatttattgggcgtaaagcgagcgcaggcggttagaaaagtctgaagtgaaaggcagtggctcaaccattgtaggctttggaaactgtttaacttgagtgcagaaggggagagtggaattccatgtgtagcggtgaaatgcgtagatatatggaggaacaccggtggcgaaagcggctctctggtctgtaactgacgctgaggctcgaaagcgtggggagcgaacaggattagataccctggtagtccacgccgtaaacgatgagtgctaggtgttaggtcctttccgggacttagtgccgcagctaacgcattaagcactccgcctggggagtacgaccgcaaggttgaaactcaaaggaattgacgggggcccgcacaagcggtggagcatgtggtttaattcgaagcaacgcgaagaaccttaccaggtcttgacatcccgatgctatttctagagataggaagtttcttcggaacatcggtgacaggtggtgcatggttgtcgtcagctcgtgtcgtgagatgttgggttaagtcccgcaacgagcgcaacccttattgttagttgccatcattgagttgggcactctagcgagactgccggtaataaaccggaggaaggtggggatgacgtcaaatcatcatgccccttatgacctgggctacacacgtgctacaatggctggtacaacgagtcgcaagccggtgacggcaagctaatctctgaaagccagtctcagttcggattgtaggctgcaactcgcctacatgaagtcggaatcgctagtaatcgcggatcagcacgccgcggtgaatacgttcccgggccttgtacacaccgcccgtcacaccacgagagtttgtaacacccgaagtcggtgaggtaaccgtaaggagccagccgcctaaggtgggatagatgattggggtg

SEQ ID NO: 1830 - DNA, 1501 bp, Streptococcus sp.
  2285-97
gacgaacgctggcggcgtgcctaatacatgcaagtagaacgctgaggtcatgtgcttgcacaagaccaaggagttgcgaacgggtgagtaacgcgtaggtaacctgcctcatagcgggggataactattggaaacgatagctaataccgcatgagagtttttaacacatgttaggaacttaaaaggagcaactgcttcactatgagatggacctgcgttgtattagctagttggtgaggtaacggctcaccaaggcgacgatacatagccgacctgagagggtgatcggccacactgggactgagacacggcccagactcctacgggaggcagcagtagggaatcttcggcaatgggggcaaccctgaccgagcaacgccgcgtgagtgaagaaggttttcggatcgtaaagctctgttgttagagaagaatggaagtaggagtggaaagtctacttcgtgacggtaactaaccagaaagggacggctaactacgtgccagcagccgcggtaatacgtaggtcccgagcgttgtccggatttattgggcgtaaagcgagcgcaggcggttctataagtctgaagttaaaggcagtggctcaaccattgttcgctttggaaactgtagaacttgagtgcagaaggggagagtggaattccatgtgtagcggtgaaatgcgtagatatatggaggaacaccggtggcgaaagcggctctctggtctgtaactgacgctgaggctcgaaagcgtggggagcaaacaggattagataccctggtagtccacgccgtaaacgatgagtgctaggtgttaggccctttccggggcttagtgccgcagctaacgcattaagcactccgcctggggagtacgaccgcaaggttgaaactcaaaggaattgacgggggcccgcacaagcggtggagcatgtggtttaattcgaagcaacgcgaagaaccttaccaggtcttgacatcccgatgcccgctctagagatagagttttacttcggtacatcggagacaggtggtgcatggttgtcgtcagctcgtgtcgtgagatgttgggttaagtcccgcaacgagcgcaacccctattgttagttgccatcattcagttgggcactctagcaagactgccggtaataaaccggaggaaggtggggatgacgtcaaatcatcatgccccttatgacctgggctacacacgtgctacaatggttggtacaacgagtcgcaagtcggtgacgacaagctaatctcttaaagccaatctcagttcggattgtaggctgcaactcgcctacatgaagtcggaatcgctagtaatcgcggatcagcacgccgcggtgaatacgttcccgggccttgtacacaccgcccgtcacaccacgagagtttgtaacacccgaagtcggtgaggtaaccttttaggagccagccgcctaaggtgggatagatgattggggtgaagtcgtaacaaggtagccgtatcggaagg

SEQ ID NO: 1831 - DNA, 1401 bp, Streptococcus sp.
  2_1_36FAA
  modified_base (1392)..(1392): a, c, t, g, unknown or other
acagtttatatcgtagcttgctacaccatagactgtgagttgcgaacgggtgagtaacgcgtaggtaacctgcctggtagcgggggataactattggaaacgatagctaataccgcataatattaattattgcatgataattaattgaaaggtgcaattgcaccactaccagatggacctgcgttgtattagctagtaggtgaggtaacggctcacctaggcgacgatacatagccgacctgagagggtgatcggccacactgggactgagacacggcccagactcctacgggaggcagcagtagggaatcttcggcaatggacgaaagtctgaccgagcaacgccgcgtgagtgaagaaggttttcggatcgtaaagctctgttgtaagagaagaacgggtgtgagagtggaaagttcacactgtgacggtatcttaccagaaagggacggctaactacgtgccagcagccgcggtaatacgtaggtcccgagcgttgtccggatttattgggcgtaaagcgagcgcaggcggttagataagtctgaagttaaaggctgtggcttaaccatagtacgctttggaaactgtttaacttgagtgcagaaggggagagtggaattccatgtgtagcggtgaaatgcgtagatatatggaggaacaccggtggcgaaagcggctctctggtctgtaactgacgctgaggctcgaaagcgtgggagcgaacaggattagataccctggtagtccacgccgtaaacgatgagtgctaggtgttaggccctttccggggcttagtgccgcagctaacgcattaagcactccgcctggggagtacgaccgcaaggttgaaactcaaaggaattgacgggggcccgcacaagcggtggagcatgtggtttaattcgaagcaacgcgaagaaccttaccaggtcttgacctcccgatgcccgctctagagatagagttttacttcggtacatcggtgacaggtggtgcatggttgtcgtcagctcgtgtcgtgagatgttgggttaagtcccgcaacgagcgcaacccttattgttagttgccatcattcagttgggcactctagcgagactgccggtaataaaccggaggaaggtggggatgacgtcaaatcatcatgccccttatgacctgggctacacacgtgctacaatggctggtacaacgagtcgcaagtcggtgacggcaagctaatctcttaaagccagtctcagttcggattgtaggctgcaactcgcctacatgaagtcggaatcgctagtaatcgcggatcagcacgccgcggtgaatacgttcccgggccttgtacacaccgcccgtcacaccacgagagtttgtaacacccgcaagtcggtgaggtanccttttagg

SEQ ID NO: 1832 - DNA, 1395 bp, Streptococcus sp.
  69130
  modified_base (39)..(40): a, c, t, g, unknown or other
  modified_base (44)..(44): a, c, t, g, unknown or other
  modified_base (89)..(89): a, c, t, g, unknown or other
  modified_base (831)..(831): a, c, t, g, unknown or other
agttgcgaacgggtgagtaacgcgtaggtaacctacctnntagngggggataactattggaaacgatagctaataccgcataacagtangtaacacatgttagatgcttgaaagatgcaattgcatcgctagtagatggacctgcgttgtattagctagtaggtagggtaatggcctacctaggcgacgatacatagccgacctgagagggtgatcggccacactgggactgagacacggcccagactcctacgggaggcagcagtagggaatcttcggcaatggggggaaccctgaccgagcaacgccgcgtgagtgaagaaggttttcggatcgtaaagctctgttgttaaggaagaacgagtgtgagaatggaaagttcatgctgtgacggtacttaaccagaaagggacggctaactacgtgccagcagccgcggtaatacgtaggtcccgagcgttgtccggatttattgggcgtaaagcgagcgcaggcggttagaaaagtctgaagtgaaaggcagtggctcaaccattgtaggctttggaaactgtttaacttgagtgcagaaggggagagtggaattccatgtgtagcggtgaaatgcgtagatatatggaggaacaccggtggcgaaagcggctctctggtctgtaactgacgctgaggctcgaaagcgtggggagcgaacaggattagataccctggtagtccacgccgtaaacgatgagtgctaggtgttaggtcctttccgggacttagtgccgcagctaacgcattaagcactccgcctggggagtacgaccgcaaggttgaaactcaaaggaattnacgggggccgcacaagcggtggagcatgtggtttaattcgaagcaacgcgaagaaccttaccaggtcttgacatcccagtgactgccctagagatagggttttccttcggggcactggtgacaggtggtgcatggttgtcgtcagctcgtgtcgtgagatgttgggttaagtcccgcaacgagcgcaacccttattgttagttgccatcattgagttgggcactctagcgagactgccggtaataaaccggaggaaggtggggatgacgtcaaatcatcatgccccttatgacctgggctacacacgtgctacaatggctggtacaacgagtcgcaagccggtgacggcaagctaatctctgaaagccagtctcagttcggattgtaggctgcaactcgcctacatgaagtcggaatcgctagtaatcgcggatcagcacgccgcggtgaatacgttcccgggccttgtacacaccgcccgtcacaccacgagagtttgtaacacccgaagtcggtgaggtaaccgtaagagccagccgcctaaggtgggatagatgattgggg

SEQ ID NO: 1833 - DNA, 1272 bp, Streptococcus sp.
  AC15
gacgaacgctggcggcgtgcctaatacatgcaagtaggacgagttgcgaacgggtgagtaacgcgtaggtaacctgcctattagagggggataactattggaaacgatagctaataccgcataacgaaagtcgctagtagatggacctgcgttgtattagctagtaggtagggtaatggcctacctaggcgacgatacatagccgacctgagagggtgatcggccacactgggactgagacacggcccagactcctacgggaggcagcagtagggaatcttcggcaatggggggaaccctgaccgagcaacgccgcgtgagtgaagaaggttttcggatcgtaaagctctgttgttaaggaagatgacggtacttaaccagaaagggacggctaactacgtgccagcagccgcggtaatacgtaggtcccgagcgttgtccggatttattgggcgtaaagcgagcgcaggcggttagaaaagtctgaagtgaaaggcagtggctcaaccattgtaggctttggaaactgtttaacttgagtgcagaaggggagagtggaattccatgtgtagcggtgaaatgcgtagatatatggaggaacaccggtggcgaaagcggctctctggtctgactgacgctgaggctcgaaagcgtggggagcgaacaggattagataccctggtagtccacgccgtaaacgatgagtgctaggtgttaggtacttagtgccgcagctaacgcattaagcactccgcctggggagtacgaccgcaaggttgaaactcaaaggaattgacgggggcccgcacaagcggtggagcatgtggtttaattcgaagcaacgcgaagaaccttaccaggtcttgacatcgacaggtggtgcatggttgtcgtcagctcgtgtcgtgagatgttgggttaagtcccgcaacgagcgcaacccttattgttagttgccatcatgggcactctagcgagactgccggtaataaaccggaggaaggtggggatgacgtcaaatcatcatgccccttatgacctgggctacacacgtgctacaatggctggcaacgagtcgcaagccggtgacggcaagctaatctctgccagtctcagttcggatgtaggctgcaactcgcctacagaagtcggaatcgctagtaatcgcggatcagcacgccgcggtgaatacgttcccgggccttgtacacaccgcccgtcacaccacgagagtttgtaacacccgaagtcggtaggtagccagccgcctaa

SEQ ID NO: 1834 - DNA, 1262 bp, Streptococcus sp.
  ACS2
ggcggcgtgcctaatacatgcaagtagaacgagttgcgaacgggtgagtaacgcgtaggtaacctgccttgtagcgggggataactattggaaacgatagctaataccgcataacgaaagccactacaagatggacctgcgttgtattagctagtaggtgaggtaacggctcacctaggcgacgatacatagccgacctgagagggtgatcggccacactgggactgagacacggcccagactcctacgggaggcagcagtagggaatcttcggcaatgggggcaaccctgaccgagcaacgccgcgtgagtgaagaaggttttcggatcgtaaagctctgttgtaagtcaagatgacggtagcttaccagaaagggacggctaactacgtgccagcagccgcggtaatacgtaggtcccgagcgttgtccggatttattgggcgtaaagcgagcgcaggcggtttgataagtctgaagttaaaggctgtggctcaaccatagttcgctttggaaactgtcaaacttgagtgcagaaggggagagtggaattccatgtgtagcggtgaaatgcgtagatatatggaggaacaccggtggcgaaagcggctctctggtctgactgacgctgaggctcgaaagcgtggggagcgaacaggattagataccctggtagtccacgccgtaaacgatgagtgctaggtgttggatattcagtgccgcagctaacgcattaagcactccgcctggggagtacgaccgcaaggttgaaactcaaaggaattgacgggggcccgcacaagcggtggagcatgtggtttaattcgaagcaacgcgaagaaccttaccaggtcttgacatcgacaggtggtgcatggttgtcgtcagctcgtgtcgtgagatgttgggttaagtcccgcaacgagcgcaacccctattgttagttgccatcatgggcactctagcgagactgccggtaataaaccggaggaaggtggggatgacgtcaaatcatcatgccccttatgacctgggctacacacgtgctacaatggttggcaacgagttgcgagtcggtgacggcaagctaatctcttccaatctcagttcggatgtaggctgcaactcgcctacagaagtcggaatcgctagtaatcgcggatcagcacgccgcggtgaatacgttcccgggccttgtacacaccgcccgtcacaccacgagagtttgtaacacccgaagtcggtaggtagccagccgcctaa

SEQ ID NO: 1835 - DNA, 1449 bp, Streptococcus sp.
  AS20
  modified_base (1361)..(1361): a, c, t, g, unknown or other
acgctggcggcgtgcctaatacatgcaagtagaacgcacaggatgcaccgtagtttactacaccgtattctgtgagttgcgaacgggtgagtaacgcgtaggtaacctgcctggtagcgggggataactattggaaacgatagctaataccgcataagaacatttactgcatggtagatgtttaaaaggtgcaagagcatcactaccagatggacctgcgttgtattagctagttggtgaggtaacggctcaccaaggcaacgatacatagccgacctgagagggtgatcggccacactgggactgagacacggcccagactcctacgggaggcagcagtagggaatcttcggcaatggggggaaccctgaccgagcaacgccgcgtgagtgaagaaggttttcggatcgtaaagctctgttgttaaggaagaacgtgtgtgagagtggaaagttcacacagtgacggtacttaaccagaaagggacggctaactacgtgccagcagccgcggtaatacgtaggtcccgagcgttgtccggatttattgggcgtaaagcgagcgcaggcggttagataagtctgaagtgaaaggcagtggctcaaccattgtaggctttggaaactgtttaacttgagtgcagaaggggagagtggaattccatgtgtagcggtgaaatgcgtagatatatggaggaacaccggtggcgaaagcggctctctggtctgtaactgacgctgaggctcgaaagcgtggggagcgaacaggattagataccctggtagtccacgccgtaaacgatgagtgctaggtgttaggtcctttccgggacttagtgccgcagctaacgcattaagcactccgcctggggagtacgaccgcaaggttgaaactcaaaggaattgacgggggcccgcacaagcggtggagcatgtggtttaattcgaagcaacgcgaagaaccttaccaggtcttgacatcccgatgcccgctctagagatagagctttacttcggtacatcggtgacaggtggtgcatggttgtcgtcagctcgtgtcgtgagatgttgggttaagtcccgcaacgagcgcaacccttattgttagttgccatcattcagttgggcactctagcgagactgccggtaataaaccggaggaaggtggggatgacgtcaaatcatcatgccccttatgacctgggctacacacgtgctacaatggctggtacaacgagtcgcaagccggtgacggcaagctaatctctgaaagccagtctcagttcggattgtaggctgcaactcgcctacatgaagtcggaatcgctagtaatcgcggatcagcacgccgcgggtggaatncgttcccgggccttgtacacaccgcccgtcacaccacgagagtttgtaacacccgaagtcggtgaggtaaccgtaaggagccagccgc

SEQ ID NO: 1836 - DNA, 1360 bp, Streptococcus sp.
  BS35a
atacatgcaagtagaacgctgaagagaggagcttgctcttcttggatgagttgcgaacgggtgagtaacgcgtaggtaacctgcctggtagcgggggataactattggaaacgatagctaataccgcataaaatggattatcgcatgataattcattgaaaggtgcaaatgcatcactaccagatggacctgcgttgtattagctagttggtggggtaacggctcaccaaggcgacgatacatagccgacctgagagggtgatcggccacactgggactgagacacggcccagactcctacgggaggcagcagtagggaatcttcggcaatggacggaagtctgaccgagcaacgccgcgtgagtgaagaaggttttcggatcgtaaagctctgttgtaagagaagaacgagtgtgagagtggaaagttcacactgtgacggtatcttaccagaaagggacggctaactacgtgccagcagccgcggtaatacgtaggtcccgagcgttgtccggatttattgggcgtaaagcgagcgcaggcggttagataagtctgaagttaaaggctgtggcttaaccatagtacgctttggaaactgtttaacttgagtgcaagaggggagagtggaattccatgtgtagcggtgaaatgcgtagatatatggaggaacaccggtggcgaaagcggctctctggcttgtaactgacgctgaggctcgaaagcgtggggagcaaacaggattagataccctggtagtccacgccgtaaacgatgagtgctaggtgttagaccctttccggggtttagtgccgcagctaacgcattaagcactccgcctggggagtacgaccgcaaggttgaaactcaaaggaattgacgggggcccgcaccagcggtggagcatgtggtttaatttgaagcaacgcgaagaaccttaccaggtcttgacatccctttgaccgctctagagaaagagttttccttcgggacagaggtgacaggtggtgcatggttgttgtcagctcgtgtcgtgagatgttgggttaagtcccgcaacgagcgcaacccctattgttagttgccatcattcagttgggcactctagcgagactgccggtaataaaccggaggaaggtggggatgacgtcaaatcatcatgccccttatgacctgggctacacacgtgctacaatggctggtacaacgagtcgcaagccggtgacggcaagctaattttttaaagccagtctcagttcggattgtaggctgcaacttgcctacatgaagttggaatcgctagtaatcgcggatcagcacgccgcggtgaatacgttcccgggccttgtacacaccgccc

SEQ ID NO: 1837 - DNA, 1037 bp, Streptococcus sp.
  C150
  modified_base (995)..(995): a, c, t, g, unknown or other
  modified_base (1002)..(1003): a, c, t, g, unknown or other
  modified_base (1016)..(1016): a, c, t, g, unknown or other
  modified_base (1018)..(1018): a, c, t, g, unknown or other
  modified_base (1020)..(1021): a, c, t, g, unknown or other
  modified_base (1028)..(1028): a, c, t, g, unknown or other
  modified_base (1030)..(1030): a, c, t, g, unknown or other
aacgctgaagagaggagcttgctcttcttggatgagttgcgaacgggtgagtaacgcgtaggtaacctgccttgtagcgggggataactattggaaacgatagctaataccgcataacaatggatgacccatgtcatttatttgaaaggggcaaatgctccactacaagatggacctgcgttgtattagctagtaggtgaggtaacggctcacctaggcgacgatacatagccgacctgagagggtgatcggccacactgggactgagacacggcccagactcctacgggaggcagcagtagggaatcttcggcaatgggggcaaccctgaccgagcaacgccgcgtgagtgaagaaggttttcggatcgtaaagctctgttgtaagtcaagaacgagtgtgagagtggaaagttcacactgtgacggtagcttaccagaaagggacggctaactacgtgccagcagccgcggtaatacgtaggtcccgagcgttgtccggatttattgggcgtaaagcgagcgcaggcggtttgataagtctgaagttaaaggctgtggctcaaccatagttcgctttggaaactgtcaaacttgagtgcagaaggggagagtggaattccatgtgtagcggtgaaatgcgtagatatatggaggaacaccggtggcgaaagcggctctctggtctgtaactgacgctgaggctcgaaagcgtggggagcgaacaggattagataccctggtagtccacgccgtaaacgatgagtgctaggtgttggatcctttccgggattcagtgccgcagctaacgcattaagcactccgcctggggagtacgaccgcaaggttgaaactcaaaggaattgacgggggcccgcacaagcggtggagcatgtggtttaattcgaagcaacgcgaagaaccttaccaggtcttgacatcccgatgctatttctagagatagaaagttacttcggtacatcggtgacaggtggngcatggnngtcgtcagctcgngncnngagatgntngggttaa

SEQ ID NO: 1838 - DNA, 974 bp, Streptococcus sp.
  CM6
tagaacgctgaagagaggagcttgctcttcttggatgagttgcgaacgggtgagtaacgcgtaggtaacctgcctggtagcgggggataactattggaaacgatagctaataccgcataaaattgattatcgcatgataatcaattgaaaggtgcaaatgcatcactaccagatggacctgcgttgtattagctagttggtggggtaacggctcaccaaggcgacgatacatagccgacctgagagggtgatcggccacactgggactgagacacggcccagactcctacgggaggcagcagtagggaatcttcggcaatggacggaagtctgaccgagcaacgccgcgtgagtgaagaaggttttcggatcgtaaagctctgttgtaagagaagaacgagtgtgagagtggaaagttcacactgtgacggtatcttaccagaaagggacggctaactacgtgccagcagccgcggtaatacgtaggtcccgagcgttgtccggatttattgggcgtaaagcgagcgcaggcggttagataagtctgaagttaaaggctgtggcttaaccatagtacgctttggaaactgtttaacttgagtgcaagaggggagagtggaattccatgtgtagcggtgaaatgcgtagatatatggaggaacaccggtggcgaaagcggctctctggcttgtaactgacgctgaggctcgaaagcgtggggagcaaacaggattagataccctggtagtccacgccgtaaacgatgagtgctaggtgttagaccctttccggggtttagtgccgcagctaacgcattaagcactccgcctggggagtacgaccgcaaggttgaaactcaaaggaattgacgggggcccgcacaagcggtggagcatgtggtttaattcgaagcaacgcgaagaaccttaccaggtcttgacatccctctgaccgctctagagatagagttttcc

SEQ ID NO: 1839 - DNA, 1432 bp, Streptococcus sp.
  CM7
caggacgaacgctggcggcgtgcctaatacatgcaagtaggacgcacagtttataccgtagcttgctacaccatagactgtgagttgcgaacgggtgagtaacgcgtaggtaacctgcctattagagggggataactattggaaacgatagctaataccgcataacagtatgtaacacatgttagatgcttgaaagatgcaattgcatcgctagtagatggacctgcgttgtattagctagtaggtagggtaatggcctacctaggcgacgatacatagccgacctgagagggtgatcggccacactgggactgagacacggcccagactcctacgggaggcagcagtagggaatcttcggcaatggggggaaccctgaccgagcaacgccgcgtgagtgaagaaggttttcggatcgtaaagctctgttgttaaggaagaacgagtgtgaaaatggaaagttcatactgtgacggtacttaaccagaaagggacggctaactacgtgccagcagccgcggtaatacgtaggtcccgagcgttgtccggatttattgggcgtaaagcgagcgcaggcggttagaaaagtctgaagtgaaaggcagtggctcaaccattgtaggctttggaaactgtttaacttgagtgcagaaggggagagtggaattccatgtgtagcggtgaaatgcgtagatatatggaggaacaccggtggcgaaagcggctctctggtctgtaactgacgctgaggctcgaaagcgtggggagcgaacaggattagataccctggtagtccacgccgtaaacgatgagtgctaggtgttaggtcctttccgggacttagtgccgcagctaacgcattaagcactccgcctggggagtacgaccgcaaggttgaaactcaaaggaattgacgggggcccgcacaagcggtggagcatgtggtttaattcgaagcaacgcgaagaaccttaccaggtcttgacatcccgatgctatttctagagataggaagtttcttcggaacatcggtgacaggtggtgcatggttgtcgtcagctcgtgtcgtgagatgttgggttaagtcccgcaacgagcgcaacccttattgttagttgccatcattgagttgggcactctagcgagactgccggtaataaaccggaggaaggtggggatgacgtcaaatcatcatgccccttatgacctgggctacacacgtgctacaatggctggtacaacgagtcgcaagccggtgacggcaagctaatctctgaaagccagtctcagttcggattgtaggctgcaactcgcctacatgaagtcggaatcgctagtaatcgcggatcagcacgccgcggtgaatacgttcccgggccttgtacacaccgcccgtcacaccacgagagtttgtaacacccgaagtcggtga

SEQ ID NO: 1840 - DNA, 1387 bp, Streptococcus sp.
  ICM10
  modified_base (1346)..(1352): a, c, t, g, unknown or other
tagaacgctgaaggaggagcttgctcttctggatgagttgcgaacgggtgagtaacgcgtaggtaacctgcctggtagcgggggataactattggaaacgatagctaataccgcataagagtagatgttgcatgacatttgcttaaaaggtgcaattgcatcactaccagatggacctgcgttgtattagctagttggtgaggtaacggctcaccaaggcaacgatacatagccgacctgagagggtgatcggccacactgggactgagacacggcccagactcctacgggaggcagcagtagggaatcttcggcaatggacggaagtctgaccgagcaacgccgcgtgagtgaagaaggttttcggatcgtaaagctctgttgtaagagaagaacgagtgtgagagtggaaagttcacactgtgacggtatcttaccagaaagggacggctaactacgtgccagcagccgcggtaatacgtaggtcccgagcgttgtccggatttattgggcgtaaagcgagcgcaggcggttagataagtctgaagttaaaggctgtggcttaaccatagtacgctttggaaactgtttaacttgagtgcaagaggggagagtggaattccatgtgtagcggtgaaatgcgtagatatatggaggaacaccggtggcgaaagcggctctctggcttgtaactgacgctgagctcgaaagcgtggggagcaaacaggattagataccctggtagtccacgccgtaaacgatgagtgctaggtgttagaccctttccggggtttagtgccgcagctaacgcattaagcactccgcctggggagtacgaccgcaggttgaaactcaaaggaattgacgggggcccgcacaagcggtggagcatgtggtttaattcgaagcaacgcgaagaaccttaccaggtcttgacatccctctgaccgctctagagatagagttttccttcgggacagaggtgacaggtggtgcatggttgtcgtcagctcgtgtcgtgagatgttgggttaagtcccgcaacgagcgcaacccctattgttagttgccatcatttagttgggcactctagcgagactgccggtaataaaccggaggaaggtggggatgacgtcaaatcatcatgccccttatgacctgggctacacacgtgctacaatggctggtacaacgagtcgcaagccggtgacggcaagctaatctcttaaagccagtctcagttcggattgtaggctgcaactcgcctacatgaagtcggaatcgctagtaatcgcggatcagcacgccgcggtgaatacgttcccgggccttgtacacaccgcccnnnnnnncacgagagtttgtaacacccgaagtcggtgaggta

SEQ ID NO: 1841 - DNA, 1439 bp, Streptococcus sp.
  ICM12
ggcggcgtgcctaatacatgcaagtagaacgctgaagagaggagcttgctcttcttggatgagttgcgaacgggtgagtaacgcgtaggtaacctgcctggtagcgggggataactattggaaacgatagctaataccgcataaaatggattatcgcatgataatccattgaaaggtgcaaatgcatcactaccagatggacctgcgttgtattagctagttggtggggtaacggctcaccaaggcgacgatacatagccgacctgagagggtgatcggccacactgggactgagacacggcccagactcctacgggaggcagcagtagggaatcttcggcaatggacggaagtctgaccgagcaacgccgcgtgagtgaagaaggttttcggatcgtaaagctctgttgtaagagaagaacgagtgtgagagtggaaagttcacactgtgacggtatcttaccagaaagggacggctaactacgtgccagcagccgcggtaatacgtaggtcccgagcgttgtccggatttattgggcgtaaagcgagcgcaggcggttagataagtctgaagttaaaggctgtggcttaaccatagtacgctttggaaactgtttaacttgagtgcaagaggggagagtggaattccatgtgtagcggtgaaatgcgtagatatatggaggaacaccggtggcgaaagcggctctctggcttgtaactgacgctgaggctcgaaagcgtggggagcaaacaggattagataccctggtagtccacgccgtaaacgatgagtgctaggtgttagaccctttccggggtttagtgccgcagctaacgcattaagcactccgcctggggagtacgaccgcaaggttgaaactcaaaggaattgacgggggcccgcacaagcggtggagcatgtggtttaattcgaagcaacgcgaagaaccttaccaggtcttgacatccctctgatcgctctagagatagagttttccttcgggacagaggtgacaggtggtgcatggttgtcgtcagctcgtgtcgtgagatgttgggttaagtcccgcaacgagcgcaacccctattgttagttgccatcatttagttgggcactctagcgagactgccggtaataaaccggaggaaggtggggatgacgtcaaatcatcatgccccttatgacctgggctacacacgtgctacaatggctggtacaacgagtcgcaagccggtgacggcaagctaatctcttaaagccagtctcagttcggattgtaggctgcaactcgcctacatgaagtcggaatcgctagtaatcgcggatcagcacgccgcggtgaatacgttcccgggccttgtacacaccgcccgtcacaccacgagagtttgtaacacccgaagtcggtgaggtaaccttttaggagccagccgcctaa

SEQ ID NO: 1842 - DNA, 1432 bp, Streptococcus sp.
  ICM2
  modified_base (203)..(203): a, c, t, g, unknown or other
ggcggcgtgcctaatacatgcaagtagaacgctgaagcttggtgcttgcaccgagcggatgagttgcgaacgggtgagtaacgcgtaggtaacctgcctggtagcgggggataactattggaaacgatagctaataccgcataaaatggattatcgcatgataattcattgaaaggtgcaaatgcatcactaccagatggacntgcgttgtattagctagttggtggggtaacggctcaccaaggcgacgatacatagccgacctgagagggtgatcggccacactgggactgagacacggcccagactcctacgggaggcagcagtagggaatcttcggcaatggacggaagtctgaccgagcaacgccgcgtgagtgaagaaggttttcggatcgtaaagctctgttgtaagagaagaacgagtgtgagagtggaaagttcacactgtgacggtatcttaccagaaagggacggctaactacgtgccagcagccgcggtaatacgtaggtcccgagcgttgtccggatttattgggcgtaaagcgagcgcaggcggttagataagtctgaagttaaaggctgtggcttaaccatagtacgctttggaaactgtttaacttgagtgcaagaggggagagtggaattccatgtgtagcggtgaaatgcgtagatatatggaggaacaccggtggcgaaagcggctctctggcttgtaactgacgctgaggctcgaaagcgtggggagcaaacaggattagataccctggtagtccacgccgtaaacgatgagtgctaggtgttagaccctttccggggtttagtgccgcagctaacgcattaagcactccgcctggggagtacgaccgcaaggttgaaactcaaaggaattgacgggggcccgcacaagcggtggagcatgtggtttaattcgaagcaacgcgaagaaccttaccaggtcttgacatccctctgaccgctctagagatagagttttccttcgggacagaggtgacaggtggtgcatggttgtcgtcagctcgtgtcgtgagatgttgggttaagtcccgcaacgagcgcaacccctattgttagttgccatcatttagttgggcactctagcgagactgccggtaataaaccggaggaaggtggggatgacgtcaaatcatcatgccccttatgacctgggctacacacgtgctacaatggctggtacaacgagtcgcaagccggtgacggtaagctaatctcttaaagccagtctcagttcggattgtaggctgcaactcgcctacatgaagtcggaatcgctagtaatcgcggatcagcacgccgcggtgaatacgttcccgggccttgtacacaccgcccgtcacaccacgagagtttgtaacacccgaagtcggtgaggtaaccttttaggagccagc

SEQ ID NO: 1843 - DNA, 1261 bp, Streptococcus sp.
  ICM45
cgaacgctggcggcgtgcctaatacatgcaagtagaacgagttgcgaacgggtgagtaacgcgtaggtaacctgcctggtagcgggggataactattggaaacgatagctaataccgcataacaaaagtcactaccagatggacctgcgttgtattagctagttggtggggtaacggctcaccaaggcgacgatacatagccgacctgagagggtgatcggccacactgggactgagacacggcccagactcctacgggaggcagcagtagggaatcttcggcaatggacggaagtctgaccgagcaacgccgcgtgagtgaagaaggttttcggatcgtaaagctctgttgtaagagaagatgacggtatcttaccagaaagggacggctaactacgtgccagcagccgcggtaatacgtaggtcccgagcgttgtccggatttattgggcgtaaagcgagcgcaggcggttagataagtctgaagttaaaggctgtggcttaaccatagtacgctttggaaactgtttaacttgagtgcaagaggggagagtggaattccatgtgtagcggtgaaatgcgtagatatatggaggaacaccggtggcgaaagcggctctctggcttgactgacgctgaggctcgaaagcgtggggagcaaacaggattagataccctggtagtccacgccgtaaacgatgagtgctaggtgttagacgtttagtgccgtagctaacgcattaagcactccgcctggggagtacgaccgcaaggttgaaactcaaaggaattgacgggggcccgcacaagcggtggagcatgtggtttaattcgaagcaacgcgaagaaccttaccaggtcttgacatcgacaggtggtgcatggttgtcgtcagctcgtgtcgtgagatgttgggttaagtcccgcaacgagcgcaacccctattgttagttgccatcatgggcactctagcgagactgccggtaataaaccggaggaaggtggggatgacgtcaaatcatcatgccccttatgacctgggctacacacgtgctacaatggctggcaacgagtcgcaagccggtgacggcaagctaatctcttccagtctcagttcggatgtaggctgcaactcgcctacagaagtcggaatcgctagtaatcgcggatcagcacgccgcggtgaatacgttcccgggccttgtacacaccgcccgtcacaccacgagagtttgtaacacccgaagtcggtaggtagcca

SEQ ID NO: 1844 - DNA, 1421 bp, Streptococcus sp.
  ICM4
taatacatgcaagtagaacgctgaagagaggagcttgctcttcttggatgagttgcgaacgggtgagtaacgcgtaggtaacctgccttgtagcgggggataactattggaaacgatagctaataccgcataacaatggatgacacatgtcatttatttgaaaggggcaattgctccactacaagatggacctgcgttgtattagctagtaggtgaggtaacggctcacctaggcgacgatacatagccgacctgagagggtgatcggccacactgggactgagacacggcccagactcctacgggaggcagcagtagggaatcttcggcaatgggggcaaccctgaccgagcaacgccgcgtgagtgaagaaggttttcggatcgtaaagctctgttgtaagtcaagaacgagtgtgagagtggaaagttcacactgtgacggtagcttaccagaaagggacggctaactacgtgccagcagccgcggtaatacgtaggtcccgagcgttgtccggatttattgggcgtaaagcgagcgcaggcggtttgataagtctgaagttaaaggctgtggctcaaccatagttcgctttggaaactgtcaaacttgagtgcagaaggggagagtggaattccatgtgtagcggtgaaatgcgtagatatatggaggaacaccggtggcgaaagcggctctctggtctgtaactgacgctgaggctcgaaagcgtggggagcgaacaggattagataccctggtagtccacgccgtaaacgatgagtgctaggtgttggatcctttccgggattcagtgccgcagctaacgcattaagcactccgcctggggagtacgaccgcaaggttgaaactcaaaggaattgacgggggcccgcacaagcggtggagcatgtggtttaattcgaagcaacgcgaagaaccttaccaggtcttgacatcccgatgctatttctagagatagaaagttacttcggtacatcggtgacaggtggtgcatggttgtcgtcagctcgtgtcgtgagatgttgggttaagtcccgcaacgagcgcaacccctattgttagttgccatcattcagttgggcactctagcgagactgccggtaataaaccggaggaaggtggggatgacgtcaaatcatcatgccccttatgacctgggctacacacgtgctacaatggttggtacaacgagttgcgagtcggtgacggcaagctaatctcttaaagccaatctcagttcggattgtaggctgcaactcgcctacatgaagtcggaatcgctagtaatcgcggatcagcacgccgcggtgaatacgttcccgggccttgtacacaccgcccgtcacaccacgagagtttgtaacacccgaagtcggtgaggtaaccttttggagccagcc

SEQ ID NO: 1845 - DNA, 923 bp, Streptococcus sp.
  M143
  modified_base (882)..(888): a, c, t, g, unknown or other
gccgcggtaatacgtaggtcccgagcgttgtccgggatttattgggcgtaaagcgagcgcaggcggttagataagtctgaagttaaaggctgtggcttaaccatagtacgctttggaaactgtttaacttgagtgcaagaggggagagtggaattccatgtgtagcggtgaaatgcgtagatatatggaggaacaccggtggcgaaagcggctctctggcttgtaactgacgctgaggctcgaaagcgtggggagcaaacaggattagataccctggtagtccacgccgtaaacgatgagtgctaggtgttagaccctttccggggtttagtgccgcagctaacgcattaagcactccgcctggggagtacgaccgcaaggttgaaactcaaaggaattgacgggggcccgcacaagcggtggagcatgtggtttaattcgaagcaacgcgaagaaccttaccaggtcttgacatccctctgaccgctctagagatagagttttccttcgggacagaggtgacaggtggtgcatggttgtcgtcagctcgtgtcgtgagatgttgggttaagtcccgcaacgagcgcaacccctattgttagttgccatcatttagttgggcactctagcgagactgccggtaataaaccggaggaaggtggggatgacgtcaaatcatcatgccccttatgacctgggctacacacgtgctacaatggctggtacaacgagtcgcaagccggtgacggcaagctaatctcttaaagccagtctcagttcggattgtaggctgcaactcgcctacatgaagtcggaatcgctagtaatcgcggatcagcacgccgcggtgaatacgttcccgggccttgtacacaccgcccnnnnnnncacgagagtttgtaacacccgaagtcggtgaggta

SEQ ID NO: 1846 - DNA, 1543 bp, Streptococcus sp.
  M334
tgagagtttgatcctggctcaggacgaacgctggcggcgtgcctaatacatgcaagtagaacgctgaaggaggagcttgcttctctggatgagttgcgaacgggtgagtaacgcgtaggtaacctgcctggtagcgggggataactattggaaacgatagctaataccgcataagagtagatgttgcatgacatttgcttaaaaggtgcaattgcatcactaccagatggacctgcgttgtattagctagttggtggggtaacggcttaccaaggcgacgatacatagccgacctgagagggtgatcggccacactgggactgagacacggcccagactcctacgggaggcagcagtagggaatcttcggcaatggacggaagtctgaccgagcaacgccgcgtgagtgaagaaggttttcggatcgtaaagctctgttgtaagagaagaacgagtgtgagagtggaaagttcacactgtgacggtatcttaccagaaagggacggctaactacgtgccagcagccgcggtaatacgtaggtcccgagcgttgtccggatttattgggcgtaaagcgagcgcaggcggttagataagtctgaagttaaaggctgtggcttaaccatagtacgctttggaaactgtttaacttgagtgcaagaggggagagtggaattccatgtgtagcggtgaaatgcgtagatatatggaggaacaccggtggcgaaagcggctctctggcttgtaactgacgctgaggctcgaaagcgtggggagcaaacaggattagataccctggtagtccacgccgtaaacgatgagtgctaggtgttagaccctttccggggtttagtgccgtagctaacgcattaagcactccgcctggggagtacgaccgcaaggttgaaactcaaaggaattgacgggggcccgcacaagcggtggagcatgtggtttaattcgaagcaacgcgaagaaccttaccaggtcttgacatccctctgaccgctctagagatagagttttccttcgggacagaggtgacaggtggtgcatggttgtcgtcagctcgtgtcgtgagatgttgggttaagtcccgcaacgagcgcaacccctattgttagttgccatcattcagttgggcactctagcgagactgccggtaataaaccggaggaaggtggggatgacgtcaaatcatcatgccccttatgacctgggctacacacgtgctacaatggctggtacaacgagtcgcaagccggtgacggtaagctaatctcttaaagccagtctcagttcggattgtaggctgcaactcgcctacatgaagtcggaatcgctagtaatcgcggatcagcacgccgcggtgaatacgttcccgggccttgtacacaccgcccgtcacaccacgagagtttgtaacacccgaagtcggtgaggtaaccgtaaggagccagccgcctaaggtgggatagatgattggggtgaagtcgtaacaaggtagccgtatcggaaggtgcggctggatcacctcctttct

SEQ ID NO: 1847 - DNA, 1258 bp, Streptococcus sp.
  OBRC6
acgaacgctggcggcgtgcctaatacatgcaagtaggacgagttgcgaacgggtgagtaacgcgtaggtaacctgcctattagagggggataactattggaaacgatagctaataccgcataacgaaagtcgctagtagatggacctgcgttgtattagctagtaggtagggtaatggcctacctaggcgacgatacatagccgacctgagagggtgatcggccacactgggactgagacacggcccagactcctacgggaggcagcagtagggaatcttcggcaatggggggaaccctgaccgagcaacgccgcgtgagtgaagaaggttttcggatcgtaaagctctgttgttaaggaagatgacggtacttaaccagaaagggacggctaactacgtgccagcagccgcggtaatacgtaggtcccgagcgttgtccggatttattgggcgtaaagcgagcgcaggcggttagaaaagtctgaagtgaaaggcagtggctcaaccattgtaggctttggaaactgtttaacttgagtgcagaaggggagagtggaattccatgtgtagcggtgaaatgcgtagatatatggaggaacaccggtggcgaaagcggctctctggtctgactgacgctgaggctcgaaagcgtggggagcgaacaggattagataccctggtagtccacgccgtaaacgatgagtgctaggtgttaggtacttagtgccgcagctaacgcattaagcactccgcctggggagtacgaccgcaaggttgaaactcaaaggaattgacgggggcccgcacaagcggtggagcatgtggtttaattcgaagcaacgcgaagaaccttaccaggtcttgacatcgacaggtggtgcatggttgtcgtcagctcgtgtcgtgagatgttgggttaagtcccgcaacgagcgcaacccttattgttagttgccatcatgggcactctagcgagactgccggtaataaaccggaggaaggtggggatgacgtcaaatcatcatgccccttatgacctgggctacacacgtgctacaatggctggcaacgagtcgcaagccggtgacggcaagctaatctctgccagtctcagttcggatgtaggctgcaactcgcctacagaagtcggaatcgctagtaatcgcggatcagcacgccgcggtgaatacgttcccgggccttgtacacaccgcccgtcacaccacgagagtttgtaacacccgaagtcggtaggta

SEQ ID NO: 1848 - DNA, 1447 bp, Streptococcus sp.
  SHV515
  modified_base (84)..(84): a, c, t, g, unknown or other
  modified_base (126)..(126): a, c, t, g, unknown or other
  modified_base (311)..(311): a, c, t, g, unknown or other
  modified_base (1444)..(1444): a, c, t, g, unknown or other
ttaatcatgagtcgcgaacgggtgagtaacgcgtaggtaacctgcctgatagcgggggataactattggaaacgatagctaatnccgcataagagtcgttaacacatgttaatgatttaaaaggancaattgcttcactatcagatggacctgcgttgtattagctagttggtgaggtaacggctcaccaaggcttcgatacatagccgacctgagagggtgatcggccacactgggactgagacacggcccagactcctacgggaggcagcagtagggaatcttcggcaatggacgaaagtctgaccgancaacgccgcgtgagtgaagaaggttttcggatcgtaaagctctgttataagcgaagaacgggagtaagagtggaaagtttactctgtgacggtagcttatcagaaagggacggctaactacgtgccagcagccgcggtaatacgtaggtcccgagcgttgtccggatttattgggcgtaaagcgagcgcaggtggtttaataagtctgaagttaaaggcattggctcaaccaatgtacgctttggaaactgttgaacttgagtgcagaaggggagagtggaattccatgtgtagcggtgaaatgcgtagatatatggaggaacaccggtggcgaaagcggctctctggtctgtaactgacactgaggctcgaaagcgtgggtagcgaacaggattagataccctggtagtccacgccgtaaacgatgagtgctaggtgttgggtcctttccgggactcagtgccgcagctaacgcattaagcactccgcctggggagtacgaccgcaaggttgaaactcaaaggaattgacgggggcccgcacaagcggtggagcatgtggtttaattcgaagcaacgcgaagaaccttaccaggtcttgacatcccagtgaccatcctagagataggatttcccttcggggcactggtgacaggtggtgcatggttgtcgtcagctcgtgtcgtgagatgttgggttaagtcccgcaacgagcgcaacccctattgttagttgccatcattgagttgggcactctagcgagactgccggtaataaaccggaggaaggtggggatgacgtcaaatcatcatgccccttatgacctgggctacacacgtgctacaatggtcggtacaacgagttgcgagctggtgacagtaagctaatctcttaaagccgatctcagttcggattgtaggctgcaactcgcctacatgaagtcggaatcgctagtaatcgcggatcagcacgccgcggtgaatacgttcccgggccttgtacacaccgcccgtcacaccacgagagtttgtaacacccgaagtcggtgaggtaaccatttggagccagccgcctaaggtgggatagatgattggggtgaagtcgtaacaaggtagccgtatcggaaggtgcggntgg

SEQ ID NO: 1849 - DNA, 1365 bp, Streptococcus sp.
  oral clone ASB02
  modified_base (336)..(336): a, c, t, g, unknown or other
  modified_base (373)..(373): a, c, t, g, unknown or other
  modified_base (697)..(697): a, c, t, g, unknown or other
  modified_base (1014)..(1014): a, c, t, g, unknown or other
ggagtttgattatggctcaggatgaacgctggcggcgtgcctaatacatgcaagtagaacgagttgcgaacgggtgagtaacgcgtaggtaacctgcctggtagcgggggataactattggaaacgatagctaataccgcataacgaaagccactaccagatggacctgcgttgtattagctagttggtgaggtaacggctcaccaaggcgacgatacatagccgacctgagagggtgatcggccacactgggactgagacacggcccagactcctacgggaggcagcagtagggaatcttcggcaatggacggaagtctgaccgagcaacgccgngtgagtgaagaaggttttcggatcgtaaagctctgtngtaagagaagatgacggtatcttaccagaaagggacggctaactacgtgccagcagccgcggtaatacgtaggtcccgagcgttatccggatttattgggcgtaaagcgagcgcaggcggttagataagtctgaagttaaaggctgtggcttaaccatagtacgctttggaaactgtttaacttgagtgcaagaggggagagtggaattccatgtgtagcggtgaaatgcgtagatgtatggaggaacaccggtggcgaaagcggctctctggcttgactgacgctgaggctcgaaagcgtggggagcatacaggattagatancctggtagtccacgccgtaaacgatgagtgctaggtgttgggtactcagtgccgcagctaacgcattaagcactccgcctggggagtacgaccgcaaggttgaaactcaaaggaattgacaggggcccgcacaagcggtggagcatgtggtttaattcgaagcaacgcgatgaaccttaccaggtcttgacatcgacaggtggtgcatggttgtcgtcagctcgtgtcgtgagatgttgggttaagtcccgcaacgagcgcaacccctattgttagttgccatcatgggcactctagcgagactgccggtaataaancggaggaaggtggggatgacgtcaaatcatcatgccccttatgacctgggctacacacgtgctacaatggctggcaacgagtcgcaagttggtgacggcaagctaatctcttccagtctcagttcggatgtagtctgcaactcgcctccagaagttggattcgctagtaatcgcggatcagccatggcgcggtgaatacgttcccgggccttgtacacaccgcccgtcacaccacgagagtttgtaacacccgaagtcggtaggtagccggccgcctaaggtgggatagatgattggggtgaagtcgtaacaaggtagccgtatcggaaggtgcggctggaacacctcctt

SEQ ID NO: 1850 - DNA, 1363 bp, Streptococcus sp.
  oral clone ASCA03
  modified_base (1014)..(1014): a, c, t, g, unknown or other
  modified_base (1059)..(1059): a, c, t, g, unknown or other
  modified_base (1084)..(1084): a, c, t, g, unknown or other
  modified_base (1123)..(1123): a, c, t, g, unknown or other
  modified_base (1136)..(1136): a, c, t, g, unknown or other
  modified_base (1148)..(1148): a, c, t, g, unknown or other
  modified_base (1160)..(1160): a, c, t, g, unknown or other
  modified_base (1285)..(1286): a, c, t, g, unknown or other
  modified_base (1348)..(1348): a, c, t, g, unknown or other
ggagtttgattctggctcaggacgaacgctggcggcgtgcctaatacatgcaagtagaacgagttgcgaacgggtgagtaacgcgtaggtaacctgcctggtagcgggggataactattggaaacgatagctaataccgcataataaaagtcactaccagatggacctgcgttgtattagctagttggtgaggtaacggctcaccaaggcgacgatacatagccgacctgagagggtgatcggccacactgggactgagacacggcccagactcctacgggaggcagcagtagggaatcttcggcaatggacggaagtctgaccgagcaacgccgcgtgagtgaagaaggttttcggatcgtaaagctctgttgtaagaaaaaatgacggtatcttaccagaaagggacggctaactactcgccagcagccgcggtaatacgtaggtcccgagcgttgtccggatttattgggcgtaaagcgagcgcaggcggttagataagtctgaagttaaaggctgtggcttaaccatagtacgctttggaaactgtttaacttgagtgcaagaggggagagtggaattccatgtgtagcggtgaaatgcgtagatatatggaggaacaccggtggcgaaagcggctctctggcttgactgacgctgaggctcgaaagcgtggggagcaaacaggattagataccctggtagtccacgccgtaaacgatgagtgctaggtgttagacgtttagtgccgcagctaacgcattaagcactccgcctggggagtacgaccgcaaggttgaaactcaaaggaattgacgggggcccgcacaagcggtggagcatgtggtttaattcgaagcaacgcgaagaaccttaccaggtcttgacatcgacaggtggtgcatggttgtcgtcagctcgtgtcgtgagatgttgggttaagtcccgcaacgagcgcaacccctattgttagttgccatcatgggcactctagcgagactgccggtaataaancggaggaaggtggggatgacgtcaaatcatcatgccccttatgancgggctacacacgtggtacgatggntggcaacgagtcgcaagccggtgacggcaagctaatctnttccagtctcagntcggatgtaggntgcaaatcgccnacagaagtcggaatcgctagtaatcgcggatcagcacgccgcggtgaatacgttcccgggccttgtacacaccgcccgtcacaccacgagagtttgtaacacccgaagtcggtaggtagccagcnncctaaggtgggatagatgattggggtgaagtcgtaacaaggtagccgtatcggaaggtacgnctgggacacctcctt

SEQ ID NO: 1851 - DNA, 1366 bp, Streptococcus sp.
  oral clone ASCA04
  modified_base (1016)..(1016): a, c, t, g, unknown or other
ggagtttgattatggctcaggactaacgctggcggcgtgcctaatacatgcaagtagaacgagttgcgaacgggtgagtaacgcgtaggtaacctgcctggtagcgggggataactattggaaacgatagctaataccgcataatgaaagtcactaccagatggacctgcgttgtattagctagttggtggggtaagggctcaccaaggcgacgatatatagccgacctgagagggtgatcggccacactgggactgagacacggcccagactcctacgggaggcagcagtagggaatcttcggcaatggacggaagtctgaccgagccacgccgcgtgagtgaagaaggttttcggatcgtaaagctctgttgtaagagaagatgacggtatcttaccagaaagggacggctaactacgtgccagcagccgcggtaatacgtaggtcccgagcgttgtccggatttattgggcgtaaagcgagcgcaggcggttagataagtctgaagttaaaggctgtggcttaaccatagtacgctttggaaactgtttaacttgagtgcaagaggggagagtggaattccatgtgtaccggtgaaatgggtagatatatggaggaacaccggtggcgaaagcggctctctggcttgactgacgctgaggctcgaaagcgtggggagcaaacaggattagataccctggtagtccacgccgtaaacgatgagtgctaggtgttagacgtttagtgccgtagctaacgcattaagcactccgcctggggagtacgaccgcaaggttgaaactcaaaggaattgacgggggcccgcacaagcggtggagcatgtggtttaattcgaagcaacgcgaaggaccttaccaggtcttgccatcgacaggtgatgcatggttgtcgtcagctcgtgtcgtgagatgttgggttaagtcccgcaacgagcgcaacccctattgttagttgccatcagttgggcactctagcgagactgccggtaataaancggaggaaggtggggatgacgtcaaatcatcatgccccttatgacctgggctacacacgtgctacaatggctggcaacgagtcgcaagccggtgacggcaagctaatctcttccagtctcagttcggatgtaggctgcaactcgcctacagaagtcggaatcgctagtaatcgcggatcagcacgccgcggtgaatacgttcccgggccttgtacacaccgcccgtcacaccacgagagtttgtaacacccgaagtcggtaggtagccagccgcctaaggtgggatagatgattggggtgaagtcgtaacaaggtagccgtatcggaaggtgcggctggaacacctcctt

SEQ ID NO: 1852 - DNA, 1364 bp, Streptococcus sp.
  oral clone ASCA09
  modified_base (1014)..(1014): a, c, t, g, unknown or other
ggagtttgatcatggctcaggacgaacgctggcggcgtgcctaatacatgcaagtagaacgagttgcgaacgggtgagtaacgcgtaggtaacctgcctggtagcgggggataactattggaaacgatagctaataccgcataacaaaagtcactaccagatggacctgcgttgtattagctagttggtggggtaacggctcaccaaggcgacgatacatagccgacctgagagggtgatcggccacactgggactgagacacggcccagactcctacgggaggcagcagtagggaatcttcggcaatggacggaagtctgaccgagcaacgccacgtgagtgaagaaggttttcggatcgtaaagctctgttgtaagagaagatgacggtatcttaccagaaagggacggctaactacgtgccagcagccgcggtaatacgtaggtcccgagcgttgtccggatttattgggcgtaaagcgagcgcaggcggttagataagtctgaagtaaaaggctgtggcttaaccatagtacgctttggaaactgtttaacttgagtgcaagaggggagagtggaattccatgtgtagcggtgaaatgcgtagatatatggaggaacacccgtggcgaaagcggctctctggcttgactgacgctgaggctcgaaagcgtggggagcaaacaggattagataccctggtagtccacgccgtaaacgatgagtgctaggtgttagacgtttagtgccgcagctaacgcattaagcactccgcctggggagtacgaccgcaaggttgaaactcaaaggaattgacgggggcccgcacaagcggtggagcatgtggtttaattcgaagcaacgcgaagaaccttaccaggtcttgacatcgacaggtggtgcatggttgtcgtcagctcgtgtcgtgagatgttgggttaagtcccgcaacgagcgcaacccctattgttagttgccatcatgggcactctagcgagactgccggtaataaancggaggaaggtggggatgacgtcaaatcatcatgccccttatgacctgggctacacacgtgctacaatggctggcaacgagtcgcaagccggtgacggcaagctaatctcttccagtctcagttcggatgtaggctgcaactcgcctacagaagtcggaatcgctagtaatcgcggatcagcacgccgcggtgaatacgttcccgggccttgtacacaccgcccgtcacaccacgagagtttgtaacacccgaagtcggtaggtagccagccgcctaaggtgggatagatgattggggtgaagtcgtaacaaggtagccgtatcggaaggtgcggctggatcacctcctt

SEQ ID NO: 1853 - DNA, 1361 bp, Streptococcus sp.
  oral clone ASCB04
ggagtttgatcatggctcaggacgaacgctggcggcgtgcctaatacatgcaagtagaacgagttgcgaacgggtgagtaacgcgtaggtaacctgcctggtagcgggggataactattggaaacgatagctaataccgcataatgaaagtcactaccagatgaacctgcgttgtattagctagttggtgaggtaacggctcaccaaggcgacgatacatagccgaactgagagggtgaacccccacactgggactgagacacggaccagactcctacgggaggcagcagtagggaatcttcggcaatggacggaagtctgaccgagcaacgccgcgtgagtgaagaaggttttcggatcgtaaagctctgttgtaagagaagatgacggtatcttaccagaaagggacggctaactacgtgccagcagccgcggtaatacgtaggtcccgagcgttgtccggatttattgggcgtaaagcgagcgcaggcggttagataagtctgaagttaaaggctgtggcttaaccatagtacgctttggaaactgtttaacttgagtgcaagaggggagagtggaattccatgtgtagcggtgaaatgcgtagatatatggaggaacaccggtggcgaaagcggctctctggcttgactgacgctgaggctcgaaagcgtggggagcaaacaggattagatacccggtagtccaccccgtaaacgatgagtgctaggtgttagacgtttagtaccgtagctaacgcattaagcactccgcctggggagtacgaccgcaaggttgaaactcaaaggaattgacgggggcccgcacaagcggtggagcatgtggtttaattcgaagcaacgcgaagaaccttaccaggtcttgacatcgacaggtggtgcatggttgtcgtcagctcgtgtcgtgagatgttgggttaagtcccgcaacgagcgcaaccctattgttagttgccatcatgggcactctagcgagactgccggtaataaaccggaggaaggtgggatgacgtcaaatcatcatgccccttatgacctgggctacacacgtgctacaatggctggcaacgagtcgcaagccggtgacggcaagctaatctcttccagtctcagttcggatgtaggctgcaactcgcctacagaagtcggaatcgctagtaatcgcggatcagcacgccgcggtgaatacgttcccgggccttgtacacaccgcccgtcacaccacgagagtttgtaacacccgaagtcggtaggtagccagccgcctaaggtgggatagatgattggggtgaagtcgtaacaaggtagccgtatcggaaggtgcggctggaacacctcctt

SEQ ID NO: 1854 - DNA, 1358 bp, Streptococcus sp.
  oral clone ASCB06
  modified_base (59)..(59): a, c, t, g, unknown or other
  modified_base (457)..(457): a, c, t, g, unknown or other
ggagtttgattatggctcagatgaacgctggcggcgtgcctaatacatgcaagtagaantagttgcgaacgggtgagtaacgcgtaggtaacctgcctcttagcgggggataactattggaaacgatagctaataccgcataagaaagtcactaagagatggacctgcgttgtattagctagttggtgaggtaacggctcaccaaggcgacgataaatagccgacctgagaggatgatccgccacactgggactgagacacggcccagactcctacgggaggcagcagtagggaatcttcgacaatggacgcaactgacccagcaacgccgcgtgactgaagaaggccttcggatcgtaaagcactgttgtaagagaagatgacggtaacttaccagaaagggacggctaactacgtgccagcagccgcggtaatacgtaggtcccgagcgttatcnggatttattgggcgtaaagcgagcgcaggcggttagataagtctgaagttaaaggctgtggcttaaccatagtacgctttggaaactgtttaacttgagtgcagaaggggagagtggaattccatgtgtagcggtgaaatgcgtagatatatggaggaacaccggtggcgaaagcggctctctggtctgactgacgctgaggctcgaaagcgtggggagcaaacaggattagataccctggtagtccaccccgtaaacgatgagtgctaggtgttgggtactcagtgccgcagctaacgcattaagcactccgcctggggagtaccaccgcaaggttgaaactcaaaggaattgacgggggcccgcacaagcggtggagcatgtggtttaattcgaagcaacgcgaagaaccttaccaggtcttgacatcgacaggtggtgcatggttgtcgtcagctcgtgtcgtgagatgttgggttaagtcccgcaacgagcgcaaccctattgttagttgccatcatgggcactctagcgagactgccggtaataaaccggaggaaggtgggatgacgtcaaatcatcatgccccttatgacctgggctacacacgtgctacaatggctggcaacgagtcgcgagtcggtgacggcaagctaatctcttccagtctcagttcggatgtaggctgcaactcgcctacagaagtcggaatcgttagtaatcgcggatcagcacgccgcggtgaatacgttcccgggccttgtacacaccgcccgtcacaccacgagagtttgtaacacccgaagtcggtaggtagtcagccgcctaaggtgggatagatgattggggtgaagtcgtaacaaggtagccgtatcggaaggtgcggctggatcacctcctt

SEQ ID NO: 1855 - DNA, 1359 bp, Streptococcus sp.
  oral clone ASCC04
  modified_base (1012)..(1012): a, c, t, g, unknown or other
agtttgattatggctcaggatgaacgctggcggcgtgcctaatacatgcaagtagaacgagttgcgaacgggtgagtaacgcgtaggtaacctgcctggtagcgggggataactattggaaacgatagctaataccgcataacgaaagtcactaccagatggacctgcgttgtattagctagttggtgaggtaacggctcaccaaggcgacgatacatagccgacctgagagggtgatcggccacactgggactgagacacggcccagactcctacgggaggcagcagtagggaatcttcggcaatggacggaagtctgaccgagcaacgccgcgtgagtgaagaaggttttcggatcgtaaagctctgttgtaagagaagaggacggtatcttaccagaaagggacggctaactacgtgccagcagctgcggtaatacgtaggtcccgagcgttatccggatttattgggcgtaaagcgagcgcaggcggttagataagtctgaagttaaaggctgtggcttaaccatagtacgctttggaaactgtttaacttgagtgcaagaggggagagtggaattccatgtgtagcggtgaaatgcgtagatatatggaggaacatcggtggcgaaagcggctctctggcttgactgacgctgaggctcgaaagcgtggggagcaaacaggattagataccctggtagtccacgccgtaaacgatgagtgctaggtgttgggtactcagtgccgcagctaacgcattaagcactccgcctggggagtacgaccgcaaggttgaaactcaaaggaattgacgggggcccgcacaagcggtggagcatgtggtttaattcgaagcaacgcgaagaaccttaccaggtcttgacatcgacaggtggtgcatggttgtcgtcagctcgtgtcgtgagatgttgggttaagtcccgcaacgagcgcaacccctatagttagttgccatcatgggcactctagcgagactgccggtaataaancggaggaaggtggggatgacgtcaaatcatcatgccccttatgacctgggctacacacgtgctacaatggctggcaacgagtcgcaagtcggtgacggcaagctaatctcttccagtctcagttcggatgtaggctgcaactcgcccacagaagtcggaatcgctagtaatcgcggatcagcacgccgcggtgaatacgttcccgggccttgtacacaccgcccgtcacaccacgagagtttgtaacacccgaagtcggtaggtagccagccgcctaaggtgggatagatgattggggtgaagtcgtaacaaggtagccgtatcggaaggtgcggctggaacacctc

SEQ ID NO: 1856 - DNA, 1364 bp, Streptococcus sp.
  oral clone ASCC05
  modified_base (594)..(595): a, c, t, g, unknown or other
ggagtttgatcatggctcaggacgaacgctggcggcgtgcctaatacatgcaagtagaacgagttgcgaacgggtgagtaacgcgtaggtaacctgcctggtagcgggggataactattggaaacgatagctaataccgcataacaaaagccactaccagatggacctgcgttgtattagctagttggtgaggtaacggctcaccaaggcgacgatacatagccgacctgagagggtgatcggccacactgggactgagacacggcccagactcctacgggaggcagcagtagggaatcttcggcaatggacggaagtctgaccgagcaacgccgcgtgagtgaagaaggttttcggatcgtaaagctctgttgtaagagaagatgacggtatcttaccagaaagggacggctaactacgtgccagcagccgcggtaatacgtaggtcccgagcgttatccggatttattgggcgtaaagcgagcgcaggcggttagataagtctgaagttaaaggctgtggcttaaccatagtacgctttggaaactgtttaacttgagtgcaagaggggagagtggaattccatgtgtaccnncgaaatgcgtagatatatggaggaacaccggtggcgaaagcggctctctggcttgactgacgctgaggctcgaaagcgtggggagcaaacaggattagataccccggtagtccacgccgtaaatgatgagtgctaggtgttgggtactcagtgccgcagctaacgcattaagcactccgcctggggagtacgaccgcaaggttgaaactcaaaggaattgacgggggcccgcacaagcggtggagcatgtggtttaattcgaagcaacgcgaagaaccttagcaggtcttgacatcgacaggtggtgcatggttgtcgtcagctcgtgtcgtgagatattgggttaagtcccgcaacgagcgcaacccctattgttagttgccatcatgggcactctagcgagactgccggtaataaaccggaggaaggtggggatgacgtcaaatcatcatgccccttatgacctgggctacacacgtgctacaatggctggcaacgagtcgcaagccggtgacggcaagctaatctcttccagtctcagttcggatgtaggctgcaactcgcctacagaagtcggaatcgctagtaatcgcggatcagcacgccgcggtgaatacgttcccgggccttgtacacaccgcccgtcacaccacgagagtttgtaacacccgaagtcggtaggtagccagccgcctaaggtgggatagatgattggggtgaagtcgtaacaaggtagccgtatcggaaggtgcggctggatcacctcctt

SEQ ID NO: 1857 - DNA, 1564 bp, Streptococcus sp.
  oral clone ASCC12
  modified_base (445)..(445): a, c, t, g, unknown or other
  modified_base (936)..(936): a, c, t, g, unknown or other
  modified_base (939)..(939): a, c, t, g, unknown or other
gacgttttgattcttggctcagtgaccaacgctggcggcgtgcctaatacatgcaagtagaacgctgaaggaggagcttgcttctccggatgacgttgcgaacgggtgagtaacgcgtaggtaacctgcctggtagcgggggataactattggaaacgatagctaataccgcataacagtagatatcgcatgatagctgcttgaaaggtgcaattgcaccactaccagatggacctgcgttgtattagctagttggtgaggtaacggctcaccaaggcaacgatacatagccgacctgagagggtgatcggccacactgggactgagacacggcccagactcctacgggaggcagcagtagggaatcttcggcattgtgacggaagtcttgaccgagccaacgcctcggtgagtgaagaaggttttccggatcgtaaagctctgnttgtaagagacagaacgagttgtgagacgtggaaagttcacactggtgacggtatcttaccagaaagggacggctaactacgtgccagcagccgcggtaatacgtaggtcccaagcgttgtccggatttattgggcgtaaagcgagcgcaggcggttagataagtctgaagttaaaggctgtggcttaaccatagtacgctttggaaactgtttaacttgagtgcaagaggggagagtggaattccatgtgtagcggtgaaatgcgtagatatatggaggaacaccggtggcgaaaagcggctctctgggcttgtaactgacgctgaggctcgaaagcgtggggagcaaacaggattagataccctggtagtccacgccgtaaactgatgagtgctaggtgttagaccctttccggggtttagtgccgtagctaacgcattaagcactccgcctggggagtacgaccgcaaggttgaaactcaaaggaatngancgggggcccgcacaagcggtggagcatgtggtttaattcgatgcaacgcgaagaaccttacctggtcttgacatccctgtgaccgttctagagatggattgtttccttcgggagcagaggtgacaggtggtgcatggttgtcgtcagctcgtgtcgtgagatgttgggttaagtcccgcaacgagcgcaacccctattgcttaggtaaaactccccggggagttgggcactctagcgagactgccggtgataaaccggaggaaggtggggatgacgtcaagtcatcatggcccttatgacctgggctacacacgtgctacaatggcgtatacagagggaagcgatagtgcgagctggagcgaatctcacaaagtacgtctaagtccggattggagtctgcaactcgactccatgaagtcggaatcgctagtaatcgcaaatcagaatgttgcggtgaatacgttcccgggccttgtacacaccgcccgtcacaccatgggagtgggttgtaccagaagtagatagcttaaccttttggagggcgtttaccacggtatgattcatgactggggtgaagtcgtaacaaggtaaccgtaggggaacctgcggctggaacacctccttc

SEQ ID NO: 1858 - DNA, 1366 bp, Streptococcus sp.
  oral clone ASCD01
ggagtttgattctggctcaggacgaacgctggcggcgtgcctaatacatgcaagtagaacgagttgcgaacgggtgagtaacgcgtaggtaacctgcctggtagcgggggataactattggaaacgatagctaataccgcataacaaaagtcactaccagatggacctgcgttgtattagctagttggtggggtaacggctcaccaaggcgacgatacatagccgacctgagagggtgatcggccacactgggactgagacacggcccagactcctacgggaggcagcagtagggaatcttcggcaatggacggaagtctgaccgagcaacgccgcgtgagtgaagaaggttttcggatcgtaaagctctgttgtaagagaagatgatggtatcttaccagaaagggacggctaactacgtgccagcagccgcggtaatacgtaggtcccgagcgttgtccggatttattgggcgtaaagcgagcgcaggcggttagataagtctgaagttaaaggctgtggcttaaccatagtacgctttggaaactgtttaacttgagtgcaagaggggagagtggaattccatgtgtagcggtgaaatgcgtagatatatggaggaacaccggtggcgaaagcggctctctggcttgactgacgctgaggctcgaaagcgtggggagcaaacaggattagataccctggtagtccacgccgtaaacgatgagtgctaggtgttagacgtttagtgccgcagctaacgcattaagcactccgcctggggagtacgaccgcaaggttgaaactcaaaggaattgacgggggcccgcacaagcggtggagcatgtggtttaattcgaagcaacgcgaagaaccttaccaggtcttgacatcgacaggtggtgcatggttgtcgtcagctcgtgtcgtgagatgttgggttaagtcccgcaacgagcgcaacccctattgttagttgccatcagttgggcgctctagcgagactgccggtaataaaccggaggaaggtggggatgacgtcaaatcatcatgccccttatgacctgggctacacacgtgctacaatggctggcaacgtgtcgcaagccggtgacggcaagctaatctcttccagtctcagttcggatgtaggctgcaactcgcctacagaagtcggaatcgctagtaatcgcggatcagcacgccgcggtgaatacgttcccgggccttgtacacaccgcccgtcacaccacgagagtttgtaacacccgaagtcggtaggtagccagccgcctaaggtgggatagatgattggggtgaagtcgtaacaaggtagccgtatcggaaggtgcggctggaacacctcctt

SEQ ID NO: 1859 - DNA, 1364 bp, Streptococcus sp.
  oral clone ASCD09
  modified_base (1076)..(1076): a, c, t, g, unknown or other
  modified_base (1078)..(1078): a, c, t, g, unknown or other
  modified_base (1298)..(1298): a, c, t, g, unknown or other
  modified_base (1318)..(1318): a, c, t, g, unknown or other
  modified_base (1357)..(1357): a, c, t, g, unknown or other
ggagtttgattatggctcaggacgaacgctggcggcgtgcctaatacatgcaagtagaacgagttgcgaacgggtgagtaacgcgtaggtaacctgcctggtagcgggggataactattggaaacgatagctaataccgcataacaaaagtcactaccagatggacctgcgttgtattagctagttggtggggtaacggctcaccaaggcgacgatacatagccgacctgagagggtgatcggccacactgggactgagacacggcccagactcctacgggaggcagcagtagggaatcttcggcaatggacggaagtctgaccgagcaacgccgcgtgagtgaagaaggttctcggatcgtaaagctctgttgtaagagaagatgacggtatcttaccagacagggacggctaactacgtgccagcagccgcggtaatacgtaggtcccgagcgttgtccggatttattgggcgtaaagcgagcgcaggcggttagataagtctgaagttaaaggctgtggcttaaccatagtacgctttggaaactgtttaacttgagtgcaagaggggagagtggaattccatgtgtagcggtgaaatgcgtagatatatggaggaacaccggtggcgaaagcggctctctggcttgactgacgctgaggctcgaaagcgtggggagcaaacaggatcagataccctggtagtccacgccgtaaacgatgagtgctaggtgttagacgtttagtgccgtagctaacgcattaagcactccgcctggggagtacgaccgcaaggttgaaactcaaaggaattgacgggggcccgcacaagcggtggagcatgtggtttaattcgaagcaacgcgaagaaccttaccaggtcttgacatcgacaggtggtgcatggttgtcgtcagctcgtgtcgtgagatgttgggttaagtcccgcaacgagcgcaacccctattgttagttgccatcatgggcactctagcgagactgccggtaataaaccggaggaaggtggggatgacgtcaaatcatcatgccccttatgacctgggctacacacgtgntncaatggctggcaacgagtcgcaagccggtgacggcaagctaatctcttccagtctcagttcggatgtaggctgcaactcgcctacagaagtcggaatcgctagtaatcgcggatcagcacgccgcggtgaatacgttcccgggccttgtacacaccgcccgtcacaccacgagagtttgtaacacccgaagtcggtaggtagccagccgcctaaggtggnatagatgattggggggaaancgtaacaaggtagccgtatcggaaggtgcggctggatcncttcctt

SEQ ID NO: 1860 - DNA, 1342 bp, Streptococcus sp.
  oral clone ASCD10
  modified_base (244)..(244): a, c, t, g, unknown or other
  modified_base (250)..(250): a, c, t, g, unknown or other
gacgaacgctggcggcgtgcctaatacatgtaagtagaacgagttgcgaacgggtgagtaacgcgtaggtaacctgcctggtagcgggggataactattggaaacgatagctaataccgcataacaaaagtcactaccagatggacctgcgttgtattagctagttggtggggtaacggctcaccaaggcgacgatacatagccgacctgagagggtgatcggccacactgggactgagacacngcccanactcctacgggaggcagcagtagggaatcttcggcagtggacggaagtctgaccgagcacgccgcgtgagtgaagaaggtttccggatcgtaaagctctgttgtaagagaagatgacggtatcttaccagaaagggacggctaactacgtgccagcagccgcggtaatacgtaggtcccgagcgttgtccggatttattgggcgtaaagcgagcgcaggcggttagataagtctgaagttaaaggctgtggcttaaccatagtacgctttggaaactgtttaacttgagtgcaagaggggagagtggaattccatgtgtagcggtgaaatgcgtagatatatggaggaacaccggtggcgaaagcggctctctggcttgactgacgctgaggctcgaaagcgtggggagcaaacaggattagataccctggtagtccacgccgtaaacgatgagtgctaggtgttagacgtttagtgccgcagctaacgcattaagcactccgcctggggagtacgaccgcaaggttgaaatcaaaggaattgacgggggcccgcacaagcggtggagcatgtggtttaattcgaagcaacgcgaagaaccttaccaggtcttgacatcgacaggtggtgcatggttgtcgtcagctcgtgtcgtgagatgttgggttaagtcccgcaacgagcgcaacccctattgttagttgccatcatgggcactctagcgagactgccggtaataaaccggaggaaggtggggatgacgtcaaatcatcatgccccttatgacctgggctacacacgtgctacaatggctggcaacgagtcgcaagccggtgacggcaagctaatctctgccagtctcagttcggatgtaggctgcaactcgcctacagaagtcggaatcgctagtaatcgcggatcagcacgccgcggtgaatacgttcccgggccttgtacacaccgcccgtcacaccacgagagtttgtaacacccgaagtcggtaggtagccagccgcctaaggtgggatagatgattggggtgaagtcgtaacaaggtagccgtatcggaaggtgcggctggaacacctcctt

SEQ ID NO: 1861 - DNA, 1356 bp, Streptococcus sp.
  oral clone ASCE03
  modified_base (1143)..(1143): a, c, t, g, unknown or other
  modified_base (1343)..(1343): a, c, t, g, unknown or other
ggagtttgatcctggctcaggacgaacgctggcggcgtgcctaatacatgcaagtagaacgagttacgaacgggtgagtaacgcgtaggtaacctgcctggtagcgggggataactattggaaacgatagctaataccgcataaaaaagtcactaccagatggacctgcgttgtattagctagttggtggggtaaaggcttaccaaggcgacgatacatagccgacctgagagggtgaacggccacactgggactgagacacggcccagactcctacgggaggcagcagtagggaatcttcggcaatggacggaagtctgaccgagcaacgccgcgtgagtgaagaaggttttcggatcgtaaagctctgttgtaagagaagatgccggtatcttaccagaaagggacggctaactacgtgccagcagccgcggtaatacgtaggtcccgagcgttgtccggatttattgggcgtaaagggagcgcaggcggttagaaaagtctgaagttaaaggctgtggcttaaccatagtaggctttggaaactgtttaacttgagtgcaagaggggagagtggaattccatgtgtagcggtgaaatgcgtagatatatggaggaacaccggtggcgaaagcggctctctggcttgactgacgctgaggctcgaaagcgtggggatcaaacaggattagataccctggtagtccacgccgtaaacgctgagggctaggtgttagacgtttagtgccgcagctaacgcattaagcactccgcctggggagtacgaccgcaaggttgaaactcaaaggaattgacgggggcccgcacaagcggtggagcatgtggtttaattcgaagcaacgcgaagaaccttaccaggtcttgacatctacaggtggtgcatggttgtcgtcagctcgtgtcgtgagatgttgggttaagtcccgcaacgagcgcaacccctattgttagttgccatcatgggcactctagcgagactgccggtaataaaccggaggaaggtggggatgacgtcaaatcatcatgccccttatgacctgggctacacacgtgctacaatggctggcaacgagtcgcaagccggtgacggcaagctaatctctgccagtctcagttcggatntaggctgcaactcgcctacagaagtcggaatcgctagtaatcgcggatcagcacgccgcggtgaatacgttcccgggccttgtacacaccgcccgtcacaccacgagagtttgtaacacccgaagtcggtaggtagccagccgcctaaggtgggatagatgattggggtgaagtcgtaacaaggtagccgtatcgaaagntgcggctggaaca

SEQ ID NO: 1862 - DNA, 1360 bp, Streptococcus sp.
  oral clone ASCE04
  modified_base (31)..(31): a, c, t, g, unknown or other
  modified_base (334)..(334): a, c, t, g, unknown or other
  modified_base (680)..(680): a, c, t, g, unknown or other
  modified_base (684)..(684): a, c, t, g, unknown or other
ggagtttgattttggctcaggacgaacgctncggcgtgcctaatacatgcaagtagaacgagttgcgaactggtgagtaacgcgtaggtaacctgcctggtagcgggggataactattggaaacgatagctaataccgcataacaaaagtcactaccagatggacctgcgttgtattagctagttggtggggtaacggctcaccaaggcgacgatacatagccgacctgagagggtgatcggccacactgggactgagacacggcccagactcctacgggaggcagcagtagggaatcttcggcaatggacggaagtctgaccgagcaacgccngtgagtgaagaaggttttcggatcgtaaagctctgttgtaagagaagatgacggtatcttaccagaaagggacggctaactacgtgccagcagccgcggtaatacgtaggtcccgagcgttgtccggatttattgggcgtaaagcgagcgcaggcggttagataagtctgaagtttaaggctgtggcttaaccatagtacgctttggaaactgtttaacttgagtgcaagaggggagagtggaattccatgtgtagcggtgaaatgcgtagatatatggaggaacaccggtggcgaaagcggctctccgcttgactgacgctgaggctcgaaagcgtggggagcanacangattagataccctggtagtcacgccgtaaacgatgagtgctaggtgttagacgtttagtgccgcagctaacgcattaagcactccgcctggggagtacgaccgcaaggttgaaactcaaaggaattgacgggggcccgcacaagcggtggagcatgtggtttaattcgaagcaacgcgaagaaccttaccaggtcttgacatcgacaggtggtgcatggttgtcgtcagctcgtgtcgtgagatgttgggttaagtcccgcaacgagcgcaacccctattgttagttgccatcatgggcactctagcgagactgccggtaataaaccggaggaaggtggggatgacgtcaaatcatcatgccccttatgacctgggctacacacgtgctacaatggctggcaacgagtcgcaagccggtgacggcaagctaatctcttccagtctcagttcggatgtaggctgcaactcgcctacagaagtcggaatcgctagtaatcgcggatcagcacgccgcggtgaatacgttcccgggccttgtacacaccgcccgtcacaccacgagagtttgtaacacccgaagtcggtaggtagccagccgcctaaggtgggatagatgattggggtgaagtcgtaacaaggtagccgtatcggaaggtgcggctggatcacctcctt

SEQ ID NO: 1863 - DNA, 1363 bp, Streptococcus sp.
  oral clone ASCE05
  modified_base (544)..(544): a, c, t, g, unknown or other
  modified_base (634)..(634): a, c, t, g, unknown or other
  modified_base (697)..(697): a, c, t, g, unknown or other
  modified_base (727)..(727): a, c, t, g, unknown or other
ggagtttgattatggctcaggatgaacgctggcggcgtgcctaatacatgcaagtagaacgagttgcgaacgggtgagtaacgcgtaggtaacctgcctcttagcgggggataactattggaaacgatagctaataccgcataagaaagacactaagagatggacctgcgttgtattagctagttggtgaggtaacggctcaccaaggcgacgatacatagccgacctgagagggtgatcggccacactgggactgagacacggcccagactcctacgggaggcagcagtagggaatcttcggcaatgggggcaaccctgaccgagcaacgccgcgtgagtgaagaaggttttcggatcgtaaagctctgttgtaagagaagatgacggtaacttaccagaaagggacggctaactacgtgccagcagccgcggtaatacgtaggtcccgagcgttatccggatttattgggcgtaaagcgagcgcaggcggttagataagtctgaagttaaaggctgtggcttaaccatagtacgctttgganactgtttaacttgagtgcagaaggggagagtggaattccatgtgtagcggtgaaatgcgtagatatatggaggaacaccggtggcgaaancggctctctggtctgactgacgctgaggctcgaaagcgtggggagcaaacaggattagatagnctggtagtccacgccgtaaacgatgagtgntaggtgttgggtactcagtgccgcagctaacgcattaagcactccgcctgaggagtacgacagcaaggttgaaactcaaaggaattgacgggggcccgcacaagcggtggagcatgtggtttaattcgaagcaacgcgaagaaccttaccaggtcttgacatctacaggtggtgcatggttgtcgtcagctcgtgtcgtgagatgttgggttaagtcccgcaacgagcgcaacccctattgttagttgccatcatgggcactctagcgagactgccggtaataaaccggaggaaggtggggatgacgtcaaatcatcatgccccttatgacctgggctacacacgtgctacaatggctggcaacgagtcgcgagtcggtgacggcaagctaatctcttccagtctcagttcggatgtaggctgcaactcgcctacagaagtcggaatcgctagtaatcgcggatcagcacgccgcggtgaatacgttcccgggccttgtacacaccgcccgtcacaccacgagagtttgtaacacccgaagtcggtaggtagccagcagcctaaggtgggatagatgattggggtgaagtcgtaacaaggtagccgtatcggaaggtgcggctggatcacctcctt

SEQ ID NO: 1864 - DNA, 1364 bp, Streptococcus sp.
  oral clone ASCE06
  modified_base (398)..(398): a, c, t, g, unknown or other
  modified_base (401)..(401): a, c, t, g, unknown or other
  modified_base (1014)..(1014): a, c, t, g, unknown or other
ggagtttgattatggctcaggacgaacgctggcggcgtgcctaatacatgcaagtagaacgagttgcgaacgggtgagtaacgcgtaggtaacctgcctggtagcgggggataactattggaaacgatagctaataccgcataacaaaagtcactaccagatggacctgcgttgtattagctagttggtggggtaacggctcaccaaggcgacgatacatagccgacctgagagggtgatcggccacactgggactgagacacggcccagactcctacgggaggcagcagtagggaatcttcggcaatggacggaagtctgaccgagcaacgccgcgtgagtgaagaaggttttcggatcgtaaagctctgttgtaagagacgatgacggtatcttancanaaagggacggctaactacgtgccagcagccgcggtaatacgtaggtcccgagcgttgtccggatttattgggcgtaaagcgagcgcaggcggttagataagtctgaagttaaaggctgtggcttaaccatagtacgctttggaaactgtttaacttgagtgcaagaggggagagtggaattccatgtgtagcggtgaaatgcgtagatatatggaggaacaccggtggcgaaagcggctctctggcttgactgacgctgaggctcgaaagcgtggggagcaaacaggattagatacccagcaagtccacgccgtaaacgatgagtgctaggtgttagacgtttagtgccgcagctaacgcattaagcactccgcctggggagtacgaccgcaaggttgaaactcaaaggaattgacgggggcccgcacaagcggtggagcatgtggtttaattcgaagcaacgcgaagaaccttaccaggtcttgacatcgacaggtggtgcatggttgtcgtcagctcgtgtcgtgagatgttgggttaagtcccgcaacgagcgcaacccctattgttagttgccatcatgggcactctagcgagactgccggtaataaancggaggaaggtggggatgacgtcaaatcatcatgccccttatgacctgggctacacacgtgctacaatggctggcaacgagtcgcaagccggtgacggcaagctaatctcttccagtctcagttcggatgtaggctgcaactcgcctacagaagtcggaatcgctagtaatcgcggatcagcacgccgcggtgaatacgttcccgggccttgtacacaccgcccgtcacaccacgagagtttgtaacacccgaagtcggtaggtagccagccgcctaaggtgggatagatgattggggtgaagtcgtaacaaggtagccgtatcggaaggtgcggttggaacacctcctt

SEQ ID NO: 1865 - DNA, 1365 bp, Streptococcus sp.
  oral clone ASCE09
ggagtttgattatggctcaggacgaacgctggcggcgtgcctaatacatgcaagtagaacgagttgcgaacgggtgagtaacgcgtaggtaacctgcctggtagcgggggataactattggaaacgatagctaataccgcataacaaaagtcactaccagatggacctgcgttgtattagctagttggtggggtaacggctcaccaaggcgacgatacatagccgacctgagagggtgatcggccacactgggactgagacacggcccagactcctacgggaggcagcagtagggaatcttcggcaatggacggaagtctgaccgagcaacgccgcgtgagtgaagaaggttttcggatcgtaaagctctgttgtaagagaagatgacggtatcttaccagaaagggacggctaactacgtgccagcagccgcggtaatacgtaggtcccgagcgttgtccggatttattgggcgtaaagcgagcgcaggcggttagataagtctgaagttaaaggctgtggcttaaccatagtaccgctttggaaactgtttaacttgagtgcaagaggggagagtggaattccatgtgtagcggtgaaatgcgtagatatatggaggaacaccggtggcgaaagcggctctctggcttgactgacgctgaggctcgaaagcgtggggagcaaacaggattagataccctggtagtccacgccgtaaacgatgagtgctaggtgttagacgtttagtgccgcagctaacgcattaagcactccgcctggggagtacgaccgcaaggttgaaactcaaaggaattgacgggggcccgcacaagcggtggagcatgtggtttaattcgaagcaacgcgaagaaccttaccaggtcttgacatcgacaggtggtgcatggttgtcgtcagctcgtgtcgtgagatgttgggttaagtcccgcaacgagcgcaacccctattgttagttgccatcatgggcactctagcgagactgccggtaataaaccggaggaaggtggggatgacgtcaaatcatcatgccccttatgacctgggctacacacgtgctacaatggctggcaacgagtcgcaagccggtgacggcaagctaatctcttccagtctcagttcggatgtaggctgcaactcgcctacagaagtcggaatcgctagtaatcgcggatcagcacgccgcggtgaatacgttcccgggccttgtacacaccgcccgtcacaccacgagagtttgtaacacccgaagtcggtaggtagccagccgcctaaggtgggatagatgattggggtgaagtcgtaacaaggtagccgtatcggaaggtgcggctggaacacctcctt

SEQ ID NO: 1866 - DNA, 1262 bp, Streptococcus sp.
  oral clone ASCE10
  modified_base (1065)..(1065): a, c, t, g, unknown or other
  modified_base (1067)..(1067): a, c, t, g, unknown or other
  modified_base (1137)..(1137): a, c, t, g, unknown or other
  modified_base (1223)..(1223): a, c, t, g, unknown or other
  modified_base (1250)..(1250): a, c, t, g, unknown or other
ggagtttgattctggctcaggacgaacgctggcggcgtgcctaatacatgcaagtagaacgagttgcgaacgggtgagtaacgcgtaggtaacctgcctggtagcgggggataactattggaaacgatagctaataccgcataacaaaagtcactaccagatggacctgcgttgtattagctagttggtggggtaacggctcaccaaggcgacgatacatagccgacctgagagggtgatcggccacactgggactgagacacggcccagactcctacgggaggcagcagtagggaatcttcggcaatggacggaagtctgaccgagcaacgccgcgtgagtgaagaaggttttcggatcgtaaagctctgttgtaagagaagatgacggtatcttaccagaaagggacggctaactacgtgccagctgccgcggtaatacgtaggtcccgagcgttgtccggatttattgggcgtaaagcgagcgcaggcggttagataagtctgaagttaaaggctgtggcttatccatagtacgctttggaaactgtttaacttgagtgcaagaggggagagtggaattccatgtgtagcggtgaaatgcgtagatatatggaggaacaccggtggcgaaagcggctctctggcttgactgacgctgaggctcgaaagcgtggggagcaaacaggattagataacctggtagtccacgccgtaaacgatgagtgctaggtgttagacgtttagtgccgcagctaacgcattaagcactccgcctggggagtacgaccgcaaggtggaaactcaaaggaattgacgggggcccgcacaagcggtggagcatgtggtttaattcgaagcaacgcgaagaaccttatccagtcttgacatcgacaggtggtgcatggttgtcgtcagctcgtgtcgtgagatgttgggttaagtcccgcaacgagcgcaacccctattgttagttcccatcatgggcactctagcgagactgccggtaataaaccggaggaaggtggggatgacgtcaaatcatcatgccccttatgactggaancncacacgtgctacaatggctggcaacgagtcgccaaccggtgacggcaagctaatctcttccagtctcagntcggatgtaggctgcaactcgcctacagaagtcggaatcgctagtaatcgcggatcagcacgccgcggtgaatacgttcccgggcnttgtacacgccgcccgtcacccccccngagtttgtaaca

SEQ ID NO: 1867 - DNA, 1362 bp, Streptococcus sp.
  oral clone ASCE12
  modified_base (587)..(587): a, c, t, g, unknown or other
ggagtttgattctggctcaggacgaacgccggcggcgtgcctaatacatgcaagtagaacgagttgcgaacgggtgagtaacgcgtaggtaacctgcctggtagcgggggataactattggaaacgatagctaataccgcataaaaaagtcactaccagatggacctgcgttgtattagctagttggtggggtaacggctcaccaaggcgacgatacatagccgacttgagagggtgatcggccacactgggactgagacacggcccagactcctacgggaggcagcagtagggaatcttcggcaatggacggaagtctgaccgagcaacgccgcgtgagtgaagaaggttttcggatcgtaaagctctgttgtaagagaagatgacggtatcttaccagaaagggacggctaactacgtgccagcagccgcggtaatacgtaggtcccgagcgttgtccggatttattgggcgtaaagcgagcgcaggcggttagataagtctgaagttaaaggctgtggcttaaccatagtacgctttggaaactgtttaacttgagtgcaagaggggagagtggaattccatgngtagcggtgaaatgcgtaatatatggaggaacaccggtggcgaaagcggctctctggcttgactgacgctgaggctcgaaagcgtggggagcaaacaggattagataccctggtagtccacgccgtaaacgatgagtgctaggtgttagacgtttagtgccgcagctaacgcattaagcactccgcctggggagtacgaccgcaaggttgaaactcaaaggaattgacgggggcccgcacaagcggtggagcatgtggtttaattcgaagcaacgcgaagaaccttaccaggtcttgacatcgacaggtggtgcatggttgtcgtcagctcgtgtcgtgagatgttgggttaagtcccgcaacgagcgcaacccctattgttagttgccatcatgggcactctagcgagactgccggtaataaaccggaggaaggtggggatgacgtcaaatcatcatgccccttatgacctgggctacacacgtgctacaatggctggcaacgagtcgcaagccggtgacggcaagctaatctcttccagtctcagttcggatgtaggctgcaactcgcctacagaagtcggaatcgctagtaatcgcggatcagcacgccgcggtgaatacgttcccgggccttgtacacaccgcccgtcacaccacgagagtttgtaacacccgaagtcggtaggtagccagccgcctaaggtgggatagatgattggggtgaagtcgtaacaaggtagccgtatcggaaggtgcggctggaacacctcctt

SEQ ID NO: 1868 - DNA, 1364 bp, Streptococcus sp.
  oral clone ASCF05
  modified_base (1014)..(1014): a, c, t, g, unknown or other
  modified_base (1206)..(1206): a, c, t, g, unknown or other
  modified_base (1336)..(1336): a, c, t, g, unknown or other
  modified_base (1338)..(1338): a, c, t, g, unknown or other
  modified_base (1355)..(1355): a, c, t, g, unknown or other
ggagtttgatcatggctcaggacgaacgctggcggcgtgcctaatacatgcaagtagaacgagttgcgaacgggtgagtaacgcgtaggtaacctgcctggtagcggaggataactattggaaacgatagctaataccgcataacaaaagtcactaccagatggacctgcgttgtattagctagttggtggggtaacggctcaccaaggcgacgatacatagccgacctgagagggtgatcggccacactgggactgagacacggcccagactcctacgggaggcagcagtagggaatcttcggcaatggacggaagtctgaccgagcaacgccgcgtgagtgaagaaggttttcggatcgtaaagctctgttgtaagagaagatgacggtatcttaccagaaagggacggctaactacgtgccagcagccgcggtaatacgtaggtcccgagcgttgtccggatttattgggcgtaaagcgagcgcaggcggttagataagtctgaagttaaaggctgtggcttaaccatagtacgctttggaaactgtttaacttgagtgcaagaggggagagtggaattccatgtgtagcggtgaaatgcgtagatatatggaggaacaccggtggcgaaagcggctctctggcttgactgacgctgaggctcgaaagcgtggggagcaaacaggattagataccctggtagtccacgccgtaaacgatgagtgctaggtgttagacgtttagtgccgcagctaacgcattaagcactccgcctggggagtacgaccgcaaggttgaaactcaagggaattgacgggggcccgcacaagcggtggagcatgtggtttaattcgaagcaacgcgaagaaccttaccaggtcttgacatcgacaggtggtgcatggttgtcgtcagctcgtgtcgtgagatgttgggttaagtcccgcaacgagcgcaacccctattgttagttgccatcatgggcactctagcgagactgccggtaataaancggaggaaggtggggatgacgtcaaatcatcatgccccttatgacctgggctacacacgtgctacaatggctggcaacgagtcgcaagtcggtgacggcaagctaatctcttccagtctcagttcggatgtaggctgcaactcgcctacagaagtcggaatcgctagtaatcgcggatcagcacgccgcggnaaatacgttcccgggccttgtacacaccgcccgtcacaccacgagagtttgtaacacccgaagtcggtaggtagccagccgcctaaggtgggatagatgattggggtgaagtcgtaacaaggtagccggntnggaaggtgcggctaaancacctcctt

SEQ ID NO: 1869 - DNA, 1364 bp, Streptococcus sp.
  oral clone ASCF07
  modified_base (232)..(232): a, c, t, g, unknown or other
  modified_base (657)..(657): a, c, t, g, unknown or other
  modified_base (1122)..(1122): a, c, t, g, unknown or other
ggagtttgattctggctcaggatgaacgctggcggcgtgcctaatacatgcaagtagaacgagttgcgaacgggtgagtaacgcgtaggtaacctgcctcttagcgggggataactattggaaacgatagctaataccgcataagaaagtcactaagagatggacctgcgttgtattagctagttggtgaggtaacggctcaccaaggcgacgatacatagccgacctgagngggtgatcggccacactgggactgagacacggcccagactcctacgggaggcagcagtagggaatcttcggcaatgggggcaaccctgaccgagcaacgccgcgtgagtgaagaaggttttcggatcgtaaagctctgttgtaagagaagatgacggtaacttaccagaaagggacggctaactacgtgccagcagccgcggtaatacgtaggtcccgagcgttatccggatttattgggcgtaaagcgagcgcaggcggttagataagtctgaagttaaaggctgtggcttaaccatagctacgctttggaaactgtttaacttgagtgcagaaggggagagtggaattccatgtgtagcggtgaaatgcgtagatatatggaggaacaccggtggcgaaagcggctctctggtctgactgacnctgaggctcgaaagcgtggggagcaaacaggattagataccctggtagtccacgccgtaaacgatgagtgctaggtgttgggtactcagtgccgcagctaacgcattaagcactccgcctggggagtacgaccgcaaggttgaaactcaaaggaattgacgggggcccgcacaagcggtggagcatgtggtttaattcgaagcaacgcgaagaaccttaccaggtcttgacatcgacaggtggtgcatggttgtcgtcagctcgtgtcgtgagatgttgggttaagtcccgcaacgagcgcaacccctattgttagttgccatcatgggcactctagcgagactgccggtaataaaccggaggaaggtggggatgacgtcaaatcatcatgccccttatgacctgggctacacacgtgctacaatggctggcaacgagtcgcgagtcggtgacggcaagctaatntcttccagtctcagttcggatgtaggctgcaactcgcctacagaagtcggaatcgctagtaatcgcggatcagcacgccgcggtgaatacgttcccgggccttgtacacaccgcccgtcacaccacgagagtttgtaacacccgaagtcggtaggtagccagccgcctaagatgggatagatgattggggtgaagtcgtaacaaggtagccgtatcggaaggtgcggttggaacacctcctt

SEQ ID NO: 1870 - DNA, 1357 bp, Streptococcus sp.
  oral clone ASCF09
  modified_base (787)..(787): a, c, t, g, unknown or other
ggagtttgattctggctcaggacgaacgctggcggcgtgcctaatacatgcaagtagaacgagttgcgaacgggtgagtaacgcgtaggtaacctgcctggtagcgggggataactattggaaacgatagctaataccgcataataaaagccactaccagatggacctgcgttgaattagctagttggtggggtaacggctcaccaaggcgacgatacatagccgacctgagagggtgatcggccacactgggactgagacacggcccagactcctacgggaggcagcagtagggaatcttcggcaatggacgaaagtctgaccgagcaacgccgcgtgagtgaagaaggttttcggatcgtaaagctctgttgtaagagaagatgacggtatcttaccagaaagggacggctaactacgtgccagcagccgcggtaatacgtaggtcccgagcgtgtccggatttattgggcgtaaagcgagcgcaggcggttagataagtctgaagttaaaggctgtggcttaaccatagtacgctttggaaactgtttaacttgagtgcaagaggggagagtggaattccatgtgtagcggtgaaatgcgtagatatatggaggaacaccggtggcgaaagcgactctctggcttgactgacgctgaggctcgaaagcgtggggagcaaacaggattagataccccggtaatccacgccgtaaacaatgagtgctaggtgttagacgtttagtgccgtagctaacgcattaagcactccgcctggggagtacgnccgcaaggttgaaactcaaaggaattgacgggggcccgcacaagcggtggagcatgtggtttaattcgaagcaacgcgaagaaccttaccaggtcttgacatcgacaggtggtgcatggttgtcgtcagctcgtgtcgtgagatgttgggttaagtcccgcaacgagcgcaacccctatagttagttgccatcatgggcactctagcgagactgccggtaataaaccggaggaaggtggggatgacgtcaaatcatcatgccccttatgacctgggctacacacgtgctacaatggctggcaacgagtcgcaagtcggtgacggcaagctaatctcttccagtctcagttcggatgtaggctgcaactcgcctacagaagtcggaatcgctagtaatcgcggatcagcacgccgcggtgaatacgttcccgggccttgtacacaccgcccgtcacaccacgagagtttgtaacacccgaagtcggtaggtagccagccgcctaaggtgggatagatgattggggtgaagtcgtaacaaggtagccgtatcggaaggtgcggctggaacac

SEQ ID NO: 1871 - DNA, 1549 bp, Streptococcus sp.
  oral clone ASCG04
  modified_base (630)..(630): a, c, t, g, unknown or other
  modified_base (782)..(782): a, c, t, g, unknown or other
  modified_base (901)..(901): a, c, t, g, unknown or other
  modified_base (1305)..(1305): a, c, t, g, unknown or other
tgctcatggctcaggacgaacgctggcggcgtgcctaatacatgcaagtagaacgctgaaggaggagcttgctcttctggatgagttgcgaacgggtgagtaacgcgtaggtaacctgcctggtagcgggggataactattggaaacgatagctaataccgcataatattgactattgcatgatagtcaattgaaaggtgcaaatgcaccactaccagatggacctgcgttgtattagctagttggtggggtaacggctcaccaaggcgacgatacatagccgacctgagagggtgatcggccacactgggactgagacacggcccagactcctacgggaggcagcagtagggaatcttcggcaatggacggaagtctgaccgagcaacgccgcgtgagtgaagaaggttttcggatcgtaaagctctgttgtaagagaagaacgagtgtgagagtggaaagttcacactgtgacggtatcttaccagaaagggacggctaactacgtgccagcagccgcggtaatacgtaggtcccgagcgttgtccggatttattgggcgtaaagcgagcgcaggcggttagataagtctgaagttaaaggctgtggcttaaccatagtacgctttgngaaactgttaaacttggagtgcagaaggggagagtggaattcccatatgtagcggtaaaatgcgtagatatatgggaggaaccaccgctgggcgaaagcggctatctggtctgtgaactgacgctgagggctcgaaagcgtggggagcaaancaggattagataccacgggtagtccacgccgtaaacgatgagtgctaggtgttgggtcctttccgggactcagtgccgcagctaacgcattaagcactccgcctggggagtacgaccgncaaggttgaaactcaaaggaattgaccgcgggcccgcacaagcggtggagcatgtggtttaattcgaagcaacgcgaagaaccttaccaggtcttgacatcccggtgcccgtcctagagataggattttgcttcggcacacccggtgacaggtgggtgcatggttgtcgtcagctcgtgtcgtgagaatgttgggttaagtcccgcaacgagcgcaacccttattactagttgccagcattgagttgggcactctagtgagactgccggtgacaaaccggaggaaggtggggatgacgtcaaatcatcatgccccttatgacttgggctacacacgtgctacaatggatggtacaacgagcagcgaactcgcgagggtaagcgaatctcttaaagccattctcngttcggattgtaggctgcaactcgcctacatgaagccggaatcgctagtaatcgtggatcagcacgccgcggtgaatacgttcccgggtcttgtacacaccgcccgtcacaccacgagagtttgtaacacccaaagtcggtgaggtaacctttatggagccagccgcctaaggtgggatagatgattggggtgaagtcgtaacaaggtagccgtatcggaaggtgcggctggatcacctccttc

SEQ ID NO: 1872 - DNA, 1540 bp, Streptococcus sp.
  oral clone BW009
gagagtttgatyctggctcaggacgaacgctggcggcgtgcctaatacatgcaagtagaacgctgaaggaggagcttgcttctctggatgagttgcgaacgggtgagtaacgcgtaggtaacctgcctggtagcgggggataactattggaaacgatagctaataccgcataatattgattattgcatgatagtcaattaaaaggtgcaattgcatcactaccagatggacctgcgttgtattagctagttggtggggtaacggctcaccaaggcgacgatacatagccgacctgagagggtgatcggccacactgggactgagacacggcccagactcctacgggaggcagcagtagggaatcttcggcaatggacggaagtctgaccgagcaacgccgcgtgagtgaagaaggttttcggatcgtaaagctctgttgtaagagaagaacgagtgtgagagtggaaagttcacactgtgacggtatcttaccagaaagggacggctaactacgtgccagcagccgcggtaatacgtaggtcccgagcgttgtccggatttattgggcgtaaagcgagcgcaggcggttagataagtctgaagttaaaggctgtggcttaaccatagtacgctttggaaactgtttaacttgagtgcaagaggggagagtggaattccatgtgtagcggtgaaatgcgtagatatatggaggaacaccggtggcgaaagcggctctctggcttgtaactgacgctgaggctcgaaagcgtggggagcaaacaggattagataccctggtagtccacgccgtaaacgatgagtgctaggtgttagaccctttccggggtttagtgccgtagctaacgcattaagcactccgcctggggagtacgaccgcaaggttgaaactcaaaggaattgacgggggcccgcacaagcggtggagcatgtggtttaattcgaagcaacgcgaagaaccttaccaggtcttgacatccctctgaccgctctagagatagagttttccttcgggacagaggtgacaggtggtgcatggttgtcgtcagctcgtgtcgtgagatgttgggttaagtcccgcaacgagcgcaacccctattgttagttgccatcattcagttgggcactctagcgagactgccggtaataaaccggaggaaggtggggatgacgtcaaatcatcatgccccttatggcctgggctacacacgtgctacaatggctggtacaacgagtcgcaagccggtgacggcaagctaatctcttaaagccagtctcagttcggattgtaggctgcaactcgcctacatgaagtcggaatcgctagtaatcgcggatcagcacgccgcggtgaatacgttcccgggccttgtacacaccgcccgtcacaccacgagagtttgtaacacccgaagtcggtgaggtaaccatttggagccagccgcctaaggtgggatagatgattggggtgaagtcgtaacaaggtagccgtatcggaaggtgcggctggatcacctccttc

SEQ ID NO: 1873 - DNA, 1541 bp, Streptococcus sp.
  oral clone CH016
gagagtttgattctggctcaggacgaacgctggcggcgtgcctaatacatgcaagtagaacgctgaaggaggagcttgcttctctggatgagttgcgaacgggtgagtaacgcgtaggtaacctgcctggtagcgggggataactattggaaacgatagctaataccgcgtaaaattgattattgcatgatagtcaattaaaaggtgcaattgcatcactaccagatggacctgcgttgtattagctagttggtgaggtaacggctcaccaaggcaacgatacatagccgacctgagagggtgatcggccacactgggactgagacacggcccagactcctacgggaggcagcagtagggaatcttcggcaatggacggaagtctgaccgagcaacgccgcgtgagtgaagaaggttttcggatcgtaaagctctgttgcaagagaagaacgagtgtgagagtggaaagttcacactgtgacggtatcttaccagaaagggacggctaactacgtgccagcagccgcggtaatacgtaggtcccgagcgttgtccggatttattgggcgtaaagcgagcgcaggcggttagataagtctgaagttaaaggctgtggcttaaccatagtacgctttggaaactgtttaacttgagtgcaagaggggagagtggaattccatgtgtagcggtgaaatgcgtagatatatggaggaacaccggtggcgaaagcggctctctggcttgtaactgacgctgaggctcgaaagcgtggggagcaaacaggattagataccctggtagtccacgccgtaaacgatgagtgctaggtgttagaccctttccggggtttagtgccgcagctaacgcattaagcactccgcctggggagtacgaccgcaaggttgaaactcaaaggaattgacgggggcccgcacaagcggtggagcatgtggtttaattcgaagcaacgcgaagaaccttaccaggtcttgacatccctccgaccgctctagagatagagttttccttcgggacagaggtgacaggtggtgcatggttgtcgtcagctcgtgtcgtgagatgttgggttaagtcccgcaacgagcgcaacccctattgttagttgccatcatttagttgggcactctagcgagactgccggtaataaaccggaggaaggtggggatgacgtcaaatcatcatgccccttatgacctgggctacacacgtgctacaatggctggtacaacgagtcgcaagccggtgacggcaagctaatctcttaaagccagtctcagttcggattgtaggctgcaactcgcctacatgaagtcggaatcgctagtaatcgcggatcagcacgccgcggtgaatacgttcccgggccttgtacacaccgcccgtcacaccacgagagtttgtaacacccgaagtcggtgaggtaaccttttaggagccagccgcctaaggtgggatagatgattggggtgaagtcgtaacaaggtagccgtatcggaaggtgcggctggatcacctccttc

SEQ ID NO: 1874 - DNA, 1363 bp, Streptococcus sp.
  oral clone GK051
gagtttgattctggctcaggatgaacgcaggcggcgtgcctaatacatgcaagtagaacgagttgcgaacgggtgagtaacgcgtaggtaacctgcctggtagtgggggataactattggaaacgatagctaataccgcataatgaaagtcactaccagatggacctgcgttgtattagctagttggtggggtaacggctcaccaaggcgacgatacatagccgacctgagagggtgatcggccacactgggactgagacacggcccagactcctacgggaggcagcagtagggaatcttcggcaatggacgaaagtctgaccgagcaacgccgcgtgagtgaagaaggttttcggatcgtaaagctctgttgtaagagaagatgacggtatcttaccagaaagggacggctaactacgtgccagcagccgcggtaatacgtaggtcccgagcgttgtccggatttattgggcgtaaagcgagcgcagacggttagataagtctgaagttaaaggctgtggcttaaccatagtacgctttggaaactgtttaacttgagtgcaagaggggagagtggaattccatgtgtagcggtgaaatgcgtagatatatggaggaacaccggtggcgaaagcggctctctggcttgactgacgctgaggctcgaaagcgtggggagcaaacaggattagataccctggtagtccacgccgtaaacgatgagtgctaggtgttagacgtttagtgccgtagctaacgcattaagcactccgcctggggagtacgaccgcaaggttgaaactcaaaggaattgacgggggcccgcacaagcggtggagcatgtggtttaattcgaagcaacgcgaagaaccttaccaggtcttgacatcgacaggtggtgcatggttgtcgtcagctcgtgtcgtgagatgttgggttaagtcccgcaacgagcgcaacccctactgttagttgccatcatgggcactctagcgagactgccggtaataaaccggaggaaggtggggatgacgtcaaatcatcatgccccttatgacctgggctacacacgtgctacaatggctggcaacgagtcgcaagtcggtgacgacaagctaatctcttccagtctcagttcggatgtaggctgcaactcgcctacagaagtcggaatcgctagtaatcgcggatcagcacgccgcggtgaatacgttcccgggccttgtacacaccgcccgtcacaccacgagagtttgtaacacccgaagtcggtaggtagccagccgcctaaggtgggatagatgattggggtgaagtcgtaacaaggtagccgtatcggaaggtgcggctggaacacctcctt

SEQ ID NO: 1875 - DNA, 1363 bp, Streptococcus sp.
  oral clone GM006
gagtttgattctggctcaggacgaacgctggcggcgtgcctaatacatgcaagtagaacgagttgcgaacgggtgagtaacgcgtaggtaacctgcctggtagcgggggataactattggaaacgatagctaataccgcataacaaaagccactaccagatggacctgcgttgtattagctagttggtgaggtaacggctcaccaaggcgacgatacatagccgacctgagagggtgatcggccacactgggactgagacacggcccagactcctacgggaggcagcagtagggaatcttcggcaatggacggaagtctgaccgagcaaccccgcgtgagtgaagaaggttttcggatcgtaaaactctgttgttagagaagatgacggtatctaaccagaaagacacggctaactacgtgccagcagccgcggtaatacgtaggtggcaagcgttgtccggatttattgggcgtaaagcgagcgcaggcggttagataagtctgaagttaaaggctgtggcttaaccatagtacgctttggaaactgtttaacttgagtgcagaaggggagagtggaattccatgtgtagcggtgaaatgcgtagatatatggaggaacaccggtggcgaaagcggctctctggtctgactgacgctgaagctcgaaagcggggggagcaaacaggattagataccctggtagtccacgccgtaaacgatgagtgctaggtgttgggtactcagtgccgcagctaacgcattaagcactccgcctggggagtacgaccgcaaggttgaaactcaaaggaattgacgggggcccgcacaagcggtggagcatgtggtttaattcgaagcaacgcgaagaaccttaccaggtcttgacatcgacaggtggtgcatggttgtcgtcagctcgtgtcgtgagatgttgggttaagtcccgcaacgagcgcaacccctattgttagttgccatcatgggcactctagcgagactgccggtaataaaccggaggaaggtggggatgacgtcaaatcatcatgccccttatgacctgggctacacacgtgctacaatggctggcaacgagtcgcaagccggtgacggcaagctaatctcttccagtctcagttcggatgtaggctgcaactcgcctacagaagtcggaatcgctagtaatcgcggatcagcacgccgcggtgaatacgttcccgggccttgtacacaccgcccgtcacaccacgagagtttgtaacacccgaagtcggtaggtagccagccgcctaaggtgggatagatgattggggtgaagccgtaacaaggtagccgtatcggaaggtgcggctggaacacctcctt

SEQ ID NO: 1876 - DNA, 1324 bp, Streptococcus sp.
  oral clone P2PA_41 P2
gacgaacgctggcggcgtgcctaatacatgcaagtagaacgagttgcgaacgggtgagtaacgcgtaggtaacctgcctggtagcgggggataactattggaaacgatagctaataccgcataatgaaagtcactaccagatggacctgcgttgtattagctagttggtgaggtaacggctcaccaaggcaacgatacatagccgacctgagagggtgatcggccacactgggactgagacacggcccagactcctacgggaggcagcagtagggaatcttcggcaatggacggaagtctgaccgagcaacgccgcgtgagtgaagaaggttttcggatcgtaaagctctgttgtaagagaagatgacggtatcttaccagaaagggacggctaactacgtgccagcagccgcggtaatacgtaggtcccgagcgttgtccggatttattgggcgtaaagcgagcgcaggcggttagataagtctgaagttaaaggctgtggcttaaccatagtacgctttggaaactgtttaacttgagtgcaagaggggagagtggaattccatgtgtagcggtgaaatgcgtagatatatggaggaacaccggtggcgaaagcggctctctggcttgactgacgctgaggctcgaaagcgtggggagcaaacaggattagataccctggtagtccacgccgtaaacgatgagtgctaggtgttagacgtttagtgccgcagctaacgcattaagcactccgcctggggagtacgaccgcaaggttgaaactcaaaggaattgacgggggcccgcacaagcggtggagcatgtggtttaattcgaagcaacgcgaagaaccttaccaggtcttgacatcgacaggtggtgcatggttgtcgtcagctcgtgtcgtgagatgttgggttaagtcccgcaacgagcgcaacccctattgttagttgccatcatgggcactctagcgagactgccggtaataaaccggaggaaggtggggatgacgtcaaatcatcatgccccttatgacctgggctacacacgtgctacaatggctggcaacgagtcgcaagccggtgacggcaagctaatctcttccagtctcagttcggatgtaggctgcaactcgcctacagaagtcggaatcgctagtaatcgcggatcagcacgccgcggtgaatacgttcccgggccttgtacacaccgcccgtcacaccacgagagtttgtaacacccgaagtcggtaggtagccagccgcctaaggtgggatagatgattggggtgaagtcgtaacaaggtagccgtatcggaagg

SEQ ID NO: 1877 - DNA, 1324 bp, Streptococcus sp.
  oral clone P4PA_30 P4
gacgaacgttggtggcgtgcctaatacatgcaagtagaacgagttgcgaacgggtgagtaacgcgtaggtaacctgcctggtagcgggggataactattggaaacgatagctaataccgcataaagaaagtcactaccagatggacctgcgttgtattagctagttggtggggtaacggctcaccaaggcgacgatacatagccgacctgagagggtgatcggccacactgggactgagacacggcccagactcctacgggaggcagcagtagggaatcttcggcaatggacggaagtctgaccgagcaacgccgcgtgagcgaagaaggttttcggatcgtaaagctctgttgtaagagaagatgacggtatcttaccagaaagggacggctaactacgtgccagcagccgcggtaatacgtaggtcccgagcgttgtccggatttattgggcgtaaagcgagcgcaggcggttagataagtctgaagttaaaggctgtggcttaaccatagtacgctttggaaactgtttaacttgagtgcaagaggggagagtggaattccatgtgtagcggtgaaatgcgtagatatatggaggaacaccggtggcgaaagcggctctctggcttgactgacgctgaggctcgaaagcgtggggagcaaacaggattagataccctggtagtccacgccgtaaacgatgagtgctaggtgttagacgtttagtgccgcagctaacgcattaagcactccgcctggggagtacgacgcaggtgaaactcaaaggaattgacgggggcccgcacaagcggtggagcatgtggtttaattcgaagcaacgcgaagaaccttaccaggtcttgacatcgactggtggtgcatggttgtcgtcagcttgtgtcgtgagatgttgggttaagtcccgcaacgagcgcaacccctattgttagttgccatcatgggcactctagcgagactgccggtaataaaccggaggaaggtggggatgacgtcaaatcatcatgccccttatgacctgggctacacacgtgctacaatggctggcaacgagtcgcaagccggtgacggcaagctaatctcttccagtctcagttcggatgtaggctgcaactcgcctacagaagtcggaatcgctagtaatcgcggatcagcacgccgcggtgaatacgttcccgggccttgtacacaccgcccgtcacaccacgagagtttgtaacacccgaagtcggtaggtagccagccgcctaaggtgggatagatgattggggtgaagtcgtaacaaggtagccgtatcggaaggtgc

SEQ ID NO: 1878 - DNA, 1546 bp, Streptococcus sp.
  oral taxon 071
tgagagtttgatcctggctcaggacgaacgctggcggcgtgcctaatacatgcaagtagaacgctgaagagaggagcttgctcttcttggatgagttgcgaacgggtgagtaacgcgtaggtaacctgcctggtagcgggggataactattggaaacgatagctaataccgcataaaatggattatcgcatgatgattcattgaaaggtgcaaatgcatcactaccagatggacctgcgttgtattagctagttggtggggtaacggctcaccaaggcaacgatacatagccgacctgagagggtgatcggccacactgggactgagacacggcccagactcctacgggaggcagcagtagggaatcttcggcaatggacggaagtctgaccgagcaacgccgcgtgagtgaagaaggttttcggatcgtaaagctctgttgtaagagaagaacgagtgtgagagtggaaagttcacactgtgacggtatcttaccagaaagggacggctaactacgtgccagcagccgcggtaatacgtaggtcccgagcgttgtccggatttattgggcgtaaagcgagcgcaggcggttagataagtctgaagttaaaggctgtggcttaaccatagtacgctttggaaactgtttaacttgagtgcaagaggggagagtggaattccatgtgtagcggtgaaatgcgtagatatatggaggaacaccggtggcgaaagcggctctctggcttgtaactgacgctgaggctcgaaagcgtggggagcaaacaggattagataccctggtagtccacgccgtaaacgatgagtgctaggtgttagaccctttccggggtttagtgccgcagctaacgcattaagcactccgcctggggagtacgaccgcaaggttgaaactcaaaggaattgacgggggcccgcacaagcggtggagcatgtggtttaattcgaagcaacgcgaagaaccttaccaggtcttgacatccctctgatcgctctagagatagagctttccttcgggacagaggtgacaggtggtgcatggttgtcgtcagctcgtgtcgtgagatgttgggttaagtcccgcaacgagcgcaacccctattgttagttgccatcattcagttgggcactctagcgagactgccggtaataaaccggaggaaggtggggatgacgtcaaatcatcatgccccttatgacctgggctacacacgtgctacaatggctggtacaacgagtcgcaagccggtgacggcaagctaatctcttaaagccagtctcagttcggattgtaggctgcaactcgcctacatgaagtcggaatcgctagtaatcgcggatcagcacgccgcggtgaatacgttcccgggccttgtacacaccgcccgtcacaccacgagagtttgtaacacccgaagtcggtgaggtaaccttttaggagccagccgcctaaggtgggatagatgattggggtgaagtcgtaacaaggtagccgtatcggaaggtgtggctggatcacctcctttct

SEQ ID NO: 1879 - DNA, 1203 bp, Streptococcus sp.
  oral taxon G59
gatgtacgctggcggcgtgcctgatacatgcaagtagcacgctgaagcttaggtgcttgcaccgagcggatgagttgcgaaccggggtgaggtcaaacggcggtagggtaaaccttgcccttcttagcgggggatatactaatgtgtgaaaacgaatagcttaatacccgcatcataagagactgatatcgcatgatattgatttgaaagatgcaattgcatcagctaagagatggacctgtgttgtattagctagttggtgaggtaacggctgcaccaaggcaacgatacatagccgacctgagagggtgatcggccacactgggactgagacacggcccagactcgtacgggaggcagcagtagggtatcttcggcaatgggggcaaccctgaaccgagcaacgccgcgtgagtgaagaaggttttcggatcgtaaagctctgttgtaagagaagaacgagtgtgagagtggaaagttcacactgtgacggtaacttaccagaaagggacggctaactacgtgccagcagccgcggtaatacgtaggtcccgagcgttatccggatttattgggcgtaaagcgagcgcaggcggttagataagtctgaagttaaaggctgtggcttaaccatagtacgctttggaaactgtttaacttgagtgcagaaggggagagtggaattccatgtgtagcggtgaaatgcgtagatatatggaggaacaccggtggcgaaagcggctctctggtctgtaactgacgctgaggctcgaaagcgtggggagcaaacaggattagataccctggtagtccacgccgtaaacgatgagtgctaggtgttgggtcctttccgggactcagtgccgcagctaacgcattaagcactccgcctggggagtacgaccgcaaggttgaaactcaaaggaattgacgggggcccgcacaagcggtggagcatgtggtgtaattcgaagcaacgcgaagaaccttaccatgtcttgacatccctctgaccgctctagagatagagtgtcgcttcgggacagaggtgacaggtggtgcatgggtgtcgtcagctcgtgtcgtgagatgtggggttaagtccgcaacgagcgcacccctatgatagtgccatcattacgtgggcactctagcgaactgcgggtattaacccgaggaagggtgggaatacgtcaatatatg

SEQ ID NO: 1880 - DNA, 1216 bp, Streptococcus sp.
  oral taxon G62
gacgaacgctggcggcgtgcctaatacatgcaagtggaacgctgaagagaggagcttgctcttcttggatgagttgcgaacgggtgagtaacgcgtaggtaacctgcctggtagcgggggataactattggaaacgatagctaataccgcatgaaatggattatcgcatgataatcgattgaaaggtgcaaatgcatcactaccagatggacctgcgttgtattagctagttggtgaggtaacggctcaccaaggcaacgatacatagccgacctgagagggtgatcggccacactggggctgagacacggcccagactcctacgggaggcagcagtagggaatcttcggcaatggacggaagtctgaccgagcaacgccgcgtgagtgaagaaggttttcggatcgtaaagctctgttgtaagagaagaacgagtgtgagagtggaaagttcacactgtgacggtatcttaccagaaagggacggctaactacgtgccagcagccgcggtaatacgtaggtcccgagcgttgtccggatttattgggcgtaaagcgagcgcaggcggttagataagtctgaagttaaaggctgtggcttaaccatagtacgctttggaaactgtttaacttgagtgcaagaggggagagtggaattccatgtgtagcggtgaaatgcgtagatatatggaggaacaccggtggcgaaagcggctctctggcttgcaactgacgctgaggctcgaaagcgtggggagcaaacaggattaggtaccctggtagtccacgccgtaaacgatgagtgctaggtgttagaccctttccggggtttagtgccgcagctaacgcattaagcactccgcctggggagtacgaccgcaaggttgaaactcaaaggaatagacgggggcccgcacaagcggtggagcatgtggtttaattcgaagcaacgcgaagaacctaccaggtcttgacatccctctgaccgctctagagatagagttttccctcgggacagaggtgacagggtggtgcatgggttgtcgtcagctcgtgtcgtgagatgtcggggttaggtccgccacgagcgcacccctattgttgttgccatcattagttgggcaccctagcggactgccggtatttacccgaaggagggtggggattacgtcaagttactatgccccctatgatcggggctacacgagtcctacatg

SEQ ID NO: 1881 - DNA, 1204 bp, Streptococcus sp.
  oral taxon G63
gacgtacgctggcggtgtgcctgatacatgcaagtagcacgctgaagagaggtgcttgctcttcttggatgagttgcgaacgggtgagtcacgcgtaggtaacctgcctgatagcgggggctaactattgtaaacgatagctaataccgcatgaaatggattatcgcatgataatcgattgaaaggtgcagatgcatcactaccagatggacctgcgttgtattagctagttggtgaggtaacggctcaccacggcaacgatacatagccgacctgagagggtgatcggccacactgggactgagacacggccccagacacgtacggggaggcagcagtagggtatcttcggcaatggacggaagtactgaccgagcaacgccgcgtgagtgaagaaggtgttcggatcgtaaagctctgttgtaagagaagaacgagtgtgagagtggaaagttcacactgtgacggtatcttaccagaaagggacggctaactacgtgccagcagccgcggtaatacgtaggtcccgagcgttgtccggatttattgggcgtaaagcgagcgcaggcggttagataagtctgaagttaaaggctgtggcttaaccatagtacgctttggaaactgtttaacttgagtgcaagaggggagagtggaattccatgtgtagcggtgaaatgcgtagatatatggaggaacaccggtggcgaaagcggctctctggcttgtaactgacgctgaggctcgaaagcgtggggagcaaacaggattagataccctggtagtccacgccgtaaacgatgagtgctaggtgttagaccctttccggggtttagtgccgcagctaacgcattaagcactccgcctggggagtacgaccgcaaggtggaaactcaaaggaattgacgggggcacgcacaagcggtggagcatgtggtttaattcgaagcaacgcgaagaaccttaccaggtcttgacatccctctgaccgctctagagatagagttttccctcgggacagaggtgacagggtggtgcatgggttgtcgtcagccgtgtcgtgagatgttcgggttaagtccgccacgagcgccacccctattgttagttgcccatcatttaggtgggtcaccttagcgagactgcccggtattaaccggagggagggtgggaatacgtcaaatatcatgccccttatacgtgg

SEQ ID NO: 1882 - DNA, 1547 bp, Streptococcus suis
tgagagtttgatcctggctcaggacgaacgctggcggcgtgcctaatacatgcaagtagaacgctgaagtctggtgcttgcactagacggatgagttgcgaacgggtgagtaacgcgtaggtaacctgcctcatagcgggggataactattggaaacgatagctaataccgcataacagtatttaccgcatggtagatatttgaaaggagcaattgcttcactatgagatggacctgcgttgtattagctagttggtgaggtaacggctcaccaaggcttcgatacatagccgacctgagagggtgatcggccacactgggactgagacacggcccagactcctacgggaggcagcagtagggaatcttcggcaatgggggcaaccctgaccgagcaacgccgcgtgagtgaagaaggttttcggatcgtaaagctctgttgtaagagaagaactgtgagaagagtggaaagtttctcacttgacggtatcttaccagaaagggacggctaactacgtgccagcagccgcggtaatacgtaggtcccgagcgttgtccggatttattgggcgtaaagcgagcgcaggcggtttgataagtctgaagtaaaaggctgtggcttaaccatagtacgctttggaaactgtcaaacttgagtgcagaaggggagagtggaattccatgtgtagcggtgaaatgcgtagatatatggaggaacaccggtggcgaaagcggctctctggtctgtaactgacgctgaggctcgaaagcgtggggagcgaacaggattagataccctggtagtccacgccgtaaacgatgagtgctaggtgttgggtcctttccgggactcagtgccgcagctaacgcattaagcactccgcctggggagtacgaccgcaaggttgaaactcaaaggaattgacgggggcccgcacaagcggtggagcatgtggtttaattcgaagcaacgcgaagaaccttaccaggtcttgacatcccgatgaccgccctagagatagggtttctcttcggagcatcggtgacaggtggtgcatggttgtcgtcagctcgtgtcgtgagatgttgggttaagtcccgcaacgagcgcaacccctattgttagttgccatcattcagttgggcactctagcgagactgccggtaataaaccggaggaaggtggggatgacgtcaaatcatcatgccccttatgacctgggctacacacgtgctacaatggctggtacaacgagtcgcaagtcggtgacggcaagctaatctcttaaagccagtctcagttcggattgtaggctgcaactcgcctacatgaagtcggaatcgctagtaatcgcggatcagcacgccgcggtgaatacgttcccgggccttgtacacaccgcccgtcacaccacgagagtttgtaacacccgaagtcggtgaggtaaccttttaggagccagccgcctaaggtgggatagatgattggggtgaagtcgtaacaaggtagccgtatcggaaggtgcggctggatcacctcctttcta

SEQ ID NO: 1883 - DNA, 1012 bp, Streptococcus thermophilus; identical to SEQ ID NO: 1826
  modified_base (998)..(998): a, c, t, g, unknown or other
  modified_base (1005)..(1006): a, c, t, g, unknown or other

SEQ ID NO: 1884 - DNA, 1431 bp, Streptococcus uberis
agtagaacgctgaggactggtgcttgcactggtctaaggagttgcgaacgggtgagtaacgcgtaggtaacctacctcatagcgggggataactattggaaacgatagctaataccgcatgacaatagggtacacatgtaccctatttaaaaggggcaaatgcttcactatgagatggacctgcgttgtattagctagttggtaaggtaacggcttaccaaggcgacgatacatagccgacctgagagggtgatcggccacactgggactgagacacggcccagactcctacgggaggcagcagtagggaatcttcggcaatggggggaaccctgaccgagcaacgccgcgtgagtgaagaaggttttcggatcgtaaagctctgttgttagagaagaacggtaatgggagtggaaaatccattacgtgacggtaactaaccagaaagggacggctaactacgtgccagcagccgcggtaatacgtaggtcccgagcgttgtccggatttattgggcgtaaagcgagcgcaggcggtttgataagtctgaagttaaaggctgtggcttaaccatagttcgctttggaaactgtcaaacttgagtgcagaaggggagagtggaattccatgtgtagcggtgaaatgcgtagatatatggaggaacaccggtggcgaaagcggctctctggtctgtaactgacgctgaggctcgaaagcgtggggagcaaacaggattagataccctggtagtccacgccgtaaacgatgagtgctaggtgttaggccctttccggggcttagtgccggagctaacgcattaagcactccgcctggggagtacgaccgcaaggttgaaactcaaaggaattgacgggggcccgcacaagcggtggagcatgtggtttaattcgaagcaacgcgaagaaccttaccaggtcttgacatcccgatgcccgctctagagatagagctttacttcggtacatcggtgacaggtggtgcatggttgtcgtcagctcgtgtcgtgagatgttgggttaagtcccgcaacgagcgcaacccctattgttagttgccatcattaagttgggcactctagcgagactgccggtaataaaccggaggaaggtggggatgacgtcaaatcatcatgccccttatgacctgggctacacacgtgctacaatggttggtacaacgagtcgcaagccggtgacggcaagctaatctcttaaagccaatctcagttcggattgtaggctgcaactcgcctacatgaagtcggaatcgctagtaatcgcggatcagcacgccgcggtgaatacgttcccgggccttgtacacaccgcccgtcacaccacgagagtttgtaacacccgaagtcggtgaggtaacctattaggagccagccgcctaaggtgggatagatga

SEQ ID NO: 1885 - DNA, 1466 bp, Streptococcus urinalis
cgctggcggcgtgcctaatacatgcaagtagaacgctgaggtcatgtgcttgcacaagaccaaggagttgcgaacgggtgagtaacgcgtaggtaacctgcctcatagcgggggataactattggaaacgatagctaataccgcatgagagtttttaacacatgttaggaacttaaaaggagcaactgcttcactatgagatggacctgcgttgtattagctagttggtgaggtaacggctcaccaaggcgacgatacatagccgacctgagagggtgatcggccacactgggactgagacacggcccagactcctacgggaggcagcagtagggaatcttcggcaatgggggcaaccctgaccgagcaacgccgcgtgagtgaagaaggttttcggatcgtaaagctctgttgttagagaagaatggaagtaggagtggaaagtctacttcgtgacggtaactaaccagaaagggacggctaactacgtgccagcagccgcggtaatacgtaggtcccgagcgttgtccggatttattgggcgtaaagcgagcgcaggcggttctataagtctgaagttaaaggcagtggctcaaccattgttcgctttggaaactgtagaacttgagtgcagaaggggagagtggaattccatgtgtagcggtgaaatgcgtagatatatggaggaacaccggtggcgaaagcggctctctggtctgtaactgacgctgaggctcgaaagcgtggggagcaaacaggattagataccctggtagtccacgccgtaaacgatgagtgctaggtgttaggccctttccggggcttagtgccgcagctaacgcattaagcactccgcctggggagtacgaccgcaaggttgaaactcaaaggaattgacgggggcccgcacaagcggtggagcatgtggtttaattcgaagcaacgcgaagaaccttaccaggtcttgacatcccgatgcccgctctagagatagagttttacttcggtacatcggagacaggtggtgcatggttgtcgtcagctcgtgtcgtgagatgttgggttaagtcccgcaacgagcgcaacccctattgttagttgccatcattcagttgggcactctagcaagactgccggtaataaaccggaggaaggtggggatgacgtcaaatcatcatgccccttatgacctgggctacacacgtgctacaatggttggtacaacgagtcgcaagtcggtgacgacaagctaatctcttaaagccaatctcagttcggattgtaggctgcaactcgcctacatgaagtcggaatcgctagtaatcgcggatcagcacgccgcggtgaatacgttcccgggccttgtacacaccgcccgtcacaccacgagagtttgtaacacccgaagtcggtgaggtaaccttttaggagccagccgcctaaggtgggatagatgattggggtga

SEQ ID NO: 1886 - DNA, 1043 bp, Streptococcus vestibularis
  modified_base (925)..(925): a, c, t, g, unknown or other
  modified_base (932)..(932): a, c, t, g, unknown or other
  modified_base (942)..(942): a, c, t, g, unknown or other
  modified_base (978)..(978): a, c, t, g, unknown or other
  modified_base (1005)..(1007): a, c, t, g, unknown or other
  modified_base (1019)..(1019): a, c, t, g, unknown or other
  modified_base (1024)..(1024): a, c, t, g, unknown or other
  modified_base (1027)..(1028): a, c, t, g, unknown or other
agaacgctgaagagaggagcttgctcttcttggatgagttgcgaacgggtgagtaacgcgtaggtaacctgccttgtagcgggggataactattggaaacgatagctaataccgcataacaatggatgacacatgtcatttatttgaaaggggcaattgctccactacaagatggacctgcgttgtattagctagtaggtgaggtaacggctcacctaggcgacgatacatagccgacctgagagggtgatcggccacactgggactgagacacggcccagactcctacgggaggcagcagtagggaatcttcggcaatgggggcaaccctgaccgagcaacgccgcgtgagtgaagaaggttttcggatcgtaaagctctgttgtaagtcaagaacgagtgtgagagtggaaaattcacactgtgacggtagcttaccagaaagggacggctaactacgtgccagcagccgcggtaatacgtaggtcccgagcgttgtccggatttattgggcgtaaagcgagcgcaggcggtttgataagtctgaagttaaaggctgtggctcaaccatagttcgctttggaaactgtcaaacttgagtgcagaaggggagagtggaattccatgtgtagcggtgaaatgcgtagatatatggaggaacaccggtggcgaaagcggctctctggtctgtaactgacgctgaggctcgaaagcgtggggagcgaacaggattagataccctggtagtccacgccgtaaacgatgagtgctaggtgttggatcctttccgggattcagtgccgcagctaacgcattaagcactccgcctggggagtacgaccgcaaggttgaaactcaaaggaattgacgggggcccgcacaagcggtggagcatgtggtttaatttcgaagcaacgcgaagaancttaccnggtcttgacntcccgatgctatttctagagatagaaagttacttcngtacatcggtgacaggtggtgcatggnnntcgtcagctcgngtcgngannatgttgggttaagtc

SEQ ID NO: 1887 - DNA, 1195 bp, Streptococcus viridans
gagtttgatcctggctcaggacgaacgctggcggcgtgcctaatacatgcaagtagaacgcacagtttataccgtagcttgctacaccatagactgtgagttgcgaacgggtgagtaacgcgtaggtaacctgcctggtagcgggggataactattggaaacgatagctaataccgcataatattaattattgcatgataattaattgaaaggtgcaattgcaccactaccagatggacctgcgttgtactagctagtaggtgaggtaacggctcacctaggcgacgatacatagccgacctgagagggtgatcggccacactgggactgagacacggcccagactcctacgggaggcagcagtagggaatcttcggcaatggacgaaagtctgaccgagcaacgccgcgtgagtgaagaaggttttcggatcgtaaagctctgttgttagagaagaacgggtgttagagtggaaagttcacactgtgacggtatcttaccagaaagggaccgctaactaagtgccagcagccgcggtaatacgtaggtcccgagcgttgtccggatttattgggcgtaaacgagcgcagccggttagataagtctgaagttaaaggctgtggcttaaccatagtacgctttggaaactgtttaacttgagtgcagaaggggagagtgaattccatgtgtagcggtaaatgcgtagatatatggaggaacaccggtggcgaaagcggctctctggtctgtaactgacgctgaggctcgagagcgtggggagcgaacaggattagataccctggtagtccacgccgtaaacgatgagtgctaggtgttaggccctttccggggcttagtgccgcagctaacgcattaagcactccgcctggggagtacgaccgcaaggttgaaactcaaaggaattgacgggggcccgcacaagcggtggagcatgtggtttaattcgaagcaacgcgaagaaccttaccaggtcttgacatcccgatgcccgctctagagatagagttttacttcggtacatcggtgacaggtggtgcatggttgtcgtcagctcgtgtcgtgaggtgttgggttaagtcccgcaacgagcgcaacccttattgttagttgccatcattcagttgggcactctagcgagactgccggtaataaaccggaggaaggtggggatgac

SEQ ID NO: 1888 - DNA, 1313 bp, Streptomyces albus
acgctggcggcgtgcttaacacatgcaagtcgaacgagtggcgaacgggtgagtaacacgtgggcaatctgccctgcactctgggacaagccctggaaacggggtctaataccggatatggaaaggcggtgcaggatgagcccgcggcctatcagcttgttggtggggtgatggcctaccaaggcgacgacgggtagccggcctgagagggcgaccggccacactgggactgagacacggcccagactcctacgggaggcagcagtggggaatattgcacaatgggcgcaagcctgatgcagcgacgccgcgtgagggatgacggccttcgggttgtaaacctctttcagcagggaagatgacggtacctgcagaagaagcaccggctaactacgtgccagcagccgcggtaatacgtagggtgcgagcgttgtccggaattattgggcgtaaagagctcgtaggcggcttgtcgcgtcggatgtgaaagcccggggcttaaccccgggtctgcattcgatacgggcaggctagagttcggcaggggagattggaattcctggtgtagcggtgaaatgcgcagatatcaggaggaacaccggtggcgaaggcggatctctgggccgactgacgctgaggagcgaaagcgtggggagcgaacaggattagataccctggtagtccacgccgtaaacgttgggcactaggtgtgggcgcgtccgtgccgcagctaacgcattaagtgccccgcctggggagtacggccgcaaggctaaaactcaaaggaattgacgggggcccgcacaagcggcggagcatgtggcttaattcgacgcaacgcgaagaaccttaccaaggcttgacatatacaggtggtgcatggctgtcgtcagctcgtgtcgtgagatgttgggttaagtcccgcaacgagcgcaacccttgtcctgtgttgccagcaattggggactcacgggagactgccggggtcaactcggaggaaggtggggacgacgtcaagtcatcatgccccttatgtcttgggctgcacacgtgctacaatggccggcaatgagctgcgatgccgtgaggtggagcgaatctcaaccggtctcagttcggatggggtctgcaactcgaccccagaagtcggagtcgctagtaatcgcagatcagcattgctgcggtgaatacgttcccgggccttgtacacaccgcccgtcacgtcacgaaagtcggtaacacccgaagccggtgcccagggaatcgtcgaaggtgggactggcgattgggacgaagtcgtaacaaggtagccg

SEQ ID NO: 1889 - DNA, 1533 bp, Streptomyces griseus
ttcacggagagtttgatcctggctcaggacgaacgctggcggcgtgcttaacacatgcaagtcgaacgatgaagcctttcggggtggattagtggcgaacgggtgagtaacacgtgggcaatctgcccttcactctgggacaagccctggaaacggggtctaataccggataacactctgtcccgcatgggacggggttaaaagctccggcggtgaaggatgagcccgcggcctatcagcttgttggtggggtaatggcctaccaaggcgacgacgggtagccggcctgagagggcgaccggccacactgggactgagacacggcccagactcctacgggaggcagcagtggggaatattgcacaatgggcgaaagcctgatgcagcgacgccgcgtgagggatgacggccttcgggttgtaaacctctttcagcagggaagaagcgagagtgacggtacctgcagaagaagcgccggctaactacgtgccagcagccgcggtaatacgtagggcgcaagcgttgtccggaattattgggcgtaaagagctcgtaggcggcttgtcacgtcggatgtgaaagcccggggcttaaccccgggtctgcattcgatacgggctagctagagtgtggtaggggagatcggaattcctggtgtagcggtgaaatgcgcagatatcaggaggaacaccggtggcgaaggcggatctctgggccattactgacgctgaggagcgaaagcgtggggagcgaacaggattagataccctggtagtccacgccgtaaacgttgggaactaggtgttggcgacattccacgtcgtcggtgccgcagctaacgcattaagttccccgcctggggagtacggccgcaaggctaaaactcaaaggaattgacgggggcccgcacaagcagcggagcatgtggcttaattcgacgcaacgcgaagaaccttaccaaggcttgacatataccggaaagcatcagagatggtgccccccttgtggtcggtatacaggtggtgcatggctgtcgtcagctcgtgtcgtgagatgttgggttaagtcccgcaacgagcgcaacccttgttctgtgttgccagcatgcccttcggggtgatggggactcacaggagactgccggggtcaactcggaggaaggtggggacgacgtcaagtcatcatgccccttatgtcttgggctgcacacgtgctacaatggccggtacaatgagctgcgatgccgcgaggcggagcgaatctcaaaaagccggtctcagttcggattggggtctgcaactcgaccccatgaagtcggagttgctagtaatcgcagatcagcattgctgcggtgaatacgttcccgggccttgtacacaccgcccgtcacgtcacgaaagtcggtaacacccgaagccggtggcccaaccccttgtgggagggagctgtcgaaggtgggactggcgattgggacgaagtcgtaacaaggtagccgtaccggaaggtgcggctggatcacctcctttctaagga

SEQ ID NO: 1890 - DNA, 1415 bp, Streptomyces sp.
  1 AIP-2009
tgcaagtcgacgatgaaccgctttcgggcggggattagtggcgaacgggtgagtaacacgtgggcaatctgccctgcactctgggacaagccctggaaacggggtctaataccggatactcactgccttgggcatccttggcggtggaaagctccggcggtgcaggatgagcccgcggcctatcagctagttggtgaggtaatggctcaccaaggcgacgacgggtagccggcctgagagggcgaccggccacactgggactgagacacggcccagactcctacgggaggcagcagtggggaatattgcacaatgggcgaaagcctgatgcagcgacgccgcgtgagggatgacggccttcgggttgtaaacctctttcagcagggaagaagcgagagtgacggtacctgcagaagaagcgccggctaactacgtgccagcagccgcggtaatacgtagggcgcaagcgttgtccggaattattgggcgtaaagagctcgtaggcggcttgtcacgtcggttgtgaaagcccggggcttaaccccgggtctgcagtcgatacgggcaggctagagttcggtaggggagatcggaattcctggtgtagcggtgaaatgcgcagatatcaggaggaacaccggtggcgaaggcggatctctgggccgatactgacgctgaggagcgaatgcgtggggagcgaacaggattagataccctggtagtccacgccgtaaacggtgggcactaggtgtgggcaacattccacgttgtccgtgccgcagctaacgcattaagtgccccgcctggggagtacggccgcaaggctaaaactcaaaggaattgacgggggcccgcacaagcagcggagcatgtggcttaattcgacgcaacgcgaagaaccttaccaaggcttgacatacaccggaaagcattagagatagtgccccccttgtggtcggtgtacaggtggtgcatggctgtcgtcagctcgtgtcgtgagatgttgggttaagtcccgcaacgagcgcaacccttgtcccgtgttgccagcaagcccttcggggtgttggggactcacgggagaccgccggggtcaactcggaggaaggtggggacgacgtcaagtcatcatgccccttatgtcttgggctgcacacgtgctacaatggccggtacaatgagctgcgataccgcgaggtggagcgaatctcaaaaagccggtctcagttcggattggggtctgcaactcgaccccatgaagtcggagttgctagtaatcgcagatcagcattgctgcggtgaatacgttcccgggccttgtacacaccgcccgtcacgtcacgaaagtcggtaacacccgaagccggtggcccaaccccttgtgggagggagctgtcgaaggtgggaccagcgat

SEQ ID NO: 1891 - DNA, 1436 bp, Streptomyces sp.
  SD 511
  modified_base (6)..(7): a, c, t, g, unknown or other
  modified_base (9)..(9): a, c, t, g, unknown or other
  modified_base (15)..(15): a, c, t, g, unknown or other
  modified_base (1300)..(1300): a, c, t, g, unknown or other
atgaanncntttcgntgggggattagtggcgaacgggtgagtaacacgtgggcaatctgccctgcactctgggacaagccctggaaacggggtctaataccggatacgaccgcttcgggcatccgatggtggtggaaagctccggcggtgcaggatgagcccgcggcctatcagcttgttggtgaggtaacggctcaccaaggcgacgacgggtagccggcctgagagggcgaccggccacactgggactgagacacggcccagactcctacgggaggcagcagtggggaatattgcacaatgggcgcaagcctgatgcagcgacgccgcgtgagggatgacggccttcgggttgtaaacctctttcagcagggaagaagcgcaagtgacggtacctgcagaagaagcgccggctaactacgtgccagcagccgcggtaatacgtagggcgcaagcgttgtccggaattattgggcgtaaagagctcgtaggcggcttgtcgcgtcggatgtgaaagcccggggcttaactccgggtctgcattcgatacgggcaggctagagttcggtaggggagatcggaattcctggtgtagcggtgaaatgcgcagatatcaggaggaacaccggtggcgaaggcggatctctgggccgatactgacgctgaggagcgaaagcgtggggagcgaacaggattagataccctggtagtccacgccgtaaacgttgggaactaggtgtgggcgacattccacgtcgtccgtgccgcagctaacgcattaagttccccgcctggggagtacggccgcaaggctaaaactcaaaggaattgacgggggcccgcacaagcggcggagcatgtggcttaattcgacgcaacgcgaagaaccttaccaaggcttgacatacaccggaaacatccagagatgggtgcccccttgtggtcggtgtacaggtggtgcatggctgtcgtcagctcgtgtcgtgagatgttgggttaagtcccgcaacgagcgcaacccttgtcccgtgttgccagcaggcccttgtggtgctggggactcacgggagaccgccggggtcaactcggaggaaggtggggacgacgtcaagtcatcatgccccttatgtcttgggctgcacacgtgctacaatggccggtacaaagagctgcgataccgtgaggtggagcgaatctcaaaaagccggtctcagttcggattggggtctgcaactcgaccccatgaagtcggagtcgctagtaatcgcagatcaacattgctgcggtgaatacgttcccnggccttgtacacaccgcccgtcacgtcacgaaagtcggtaacacccgaaaccggtggcccaaccccttgtgggaaggagctgtccaaggtgggactggcgattgggacgaatcgtaacaaggtacctaccggaagg

SEQ ID NO: 1892 - DNA, 1447 bp, Streptomyces sp.
  SD 524
  modified_base (23)..(23): a, c, t, g, unknown or other
caagtgcaacgatgaaccacttnggtggggattagtggcgaacgggtgagtaacacgtgggcaatctgccctgcactctgggacaagccctggaaacggggtctaataccggatactgagcctcgcaggcatctgcggggttcgaaagctccggcggtgcaggatgagcccgcggcctatcagcttgttggtgaggtaacggctaccaaggcgacgacgggtagccggcctgagagggcgaccggccacactgggactgagacacggcccagactcctacgggaggcagcagtggggaatattgcacaatgggcgcaagcctgatgcagcgacgccgcgtgagggatgacggccttcgggttgtaaacctctttcagcagggaagaagcgcaagtgacggtacctgcagaagaagcgccggctaactacgtgccagcagccgcggtaatacgtagggcgcgagcgttgtccggaattattgggcgtaaagagctcgtaggcggcttgtcgcgtcggttgtgaaagcccggggcttaaccccgggtctgcagtcgatacgggcaggctagagttcggtaggggagatcggaattcctggtgtagcggtgaaatgcgcagatatcaggaggaacaccggtggcgaaggcggatctctgggccgatactgacgctgaggagcgaaagcgtggggagcgaacaggattagataccctggtagtccacgccgtaaacggtgggcactaggtgtgggcgacattccacgtcgtccgtgccgcagctaacgcattaagtgccccgcctggggagtacggccgcaaggctaaaactcaaaggaattgacgggggcccgcacaagcggcggagcatgtggcttaattcgacgcaacgcgaagaaccttaccaaggcttgacatacaccggaaagcatcagagatggtgccccccttgtggtcggtgtacaggtggtgcatggctgtcgtcagctcgtgtcgtgagatgttgggttaagtcccgcaacgagcgcaacccttgtcccgtgttgccagcaagcccttcggggtgttggggactcacgggagaccgccggggtcaactcggaggaaggtggggacgacgtcaagtcatcatgccccttatgtcttgggctgcacacgtgctacaatggccggtacaatgagctgcgataccgcgaggtggagcgaatctcaaaaagccggtctcagttcggattggggtctgcaactcgaccccatgaagtcggagtcgctagtaatcgcagatcagcattgctgcggtgaatacgttcccgggccttgtacacaccgcccgtcacgtcacgaaagtcggtaacacccgaagccggtggcccaaccccttgtgggagggagctgtcgaaggtgggactggcgattgggacgaagtcgtaacaaggtaccgtaccggaagg

SEQ ID NO: 1893 - DNA, 1405 bp, Streptomyces sp.
  SD 528
  modified_base (1385)..(1385): a, c, t, g, unknown or other
caagtcgaacgatgaacctccttcgggaggggattagtggcgaacgggtgagtaacacgtgggcaatctgccctgcactctgggacaagccctggaaacggggtctaataccggatacgacatcctcgggcatccgatggatgtggaaagctccggcggtgcaggatgagcccgcggcctatcagcttgttggtgaggtaacggctcaccaaggcgacgacgggtagccggcctgagagggcgaccggccacactgggactgagacacggcccagactcctacgggaggcagcagtggggaatattgcacaatgggcgcaagcctgatgcagcgacgccgcgtgagggatgacggccttcgggttgtaaacctctttcagcagggaagaagcgcaagtgacggtacctgcagaagaagcgccggctaactacgtgccagcagccgcggtaatacgtagggcgcgagcgttgtccggaattattgggcgtaaagagctcgtaggcggcttgtcgcgtcggttgtgaaagcccggggcttaaccccgggtctgcagtcgatacgggcaggctagagttcggtaggggagatcggaattcctggtgtagcggtgaaatgcgcagatatcaggaggaacaccggtggcgaaggcggatctctgggccgatactgacgctgaggagcgaaagcgtggggagcgaacaggattagataccctggtagtccacgccgtaaacggtgggcactaggtgtgggcaacattccacgttgtccgtgccgcagctaacgcattaagtgccccgcctggggagtacggccgcaaggctaaaactcaaaggaattgacgggggcccgcacaagcggcggagcatgtggcttaattcgacgcaacgcgaagaaccttaccaaggcttgacatacaccggaaagctctggagacagagcccccttgtggtcggtgtacaggtggtgcatggctgtcgtcagctcgtgtcgtgagatgttgggttaagtcccgcaacgagcgcaacccttgtcccgtgttgccagcaggcccttgtggtgctggggactcacgggagaccgccggggtcaactcggaggaaggtggggacgacgtcaagtcatcatgccccttatgtcttgggctgcacacgtgctacaatggccggtacaatgagctgcgataccgcgaggtggagcgaatctcaaaaagccggtctcagttcggattggggtctgcaactcgaccccatgaagtcggagtcgctagtaatcgcagatcagcattgctgcggtgaatacgttcccgggccttgtacacaccgcccgtcacgtcacgaaagtcggtaacacccgaagccggtggcccaaccccttgtggganggagctgtcgaagtgggact

SEQ ID NO: 1894 - DNA, 1441 bp, Streptomyces sp.
  SD 534
cgatgaacccacttcggtgggggattagtggcgaacgggtgagtaacacgtgggcaatctgccctgcactctgggacaagccctggaaacggggtctaataccggatacgaccactttaggcatctgatggtggtggaaagctccggcggtgcaggatgagcccgcggcctatcagcttgttggtgaggtaacggctcaccaaggcgacgacgggtagccggcctgagagggcgaccggccacactgggactgagacacggcccagactcctacgggaggcagcagtggggaatattgcaccatgggcgaaagcctgatgcagcgacgccgcgtgagggatgacggccttcgggttgtaaacctctttcagcagggaagaagcgaaagtgacggtacctgcagaagaagcgccggctaactacgtgccagcagccgcggtaatacgtagggcgcaagcgttgtccggaattattgggcgtaaagagctcgtaggcggcttgtcgcgtcggatgtgaaagcccggggcttaaccccgggtctgcattcgatacgggcaggctagagttcggtaggggagatcggaattcctggtgtagcggtgaaatgcgcagatatcaggaggaacaccggtggcgaaggcggatctctgggccgatactgacgctgaggagcgaaagcgtggggagcgaacaggattagataccctggtagtccacgccgtaaacgttgggaactaggtgtgggcgacattccacgttgtccgtgccgcagctaacgcattaagttccccgcctggggagtacggccgcaaggctaaaactcaaaggaattgacgggggcccgcacaagcggcggagcatgtggcttaattcgacgcaacgcgaagaaccttaccaaggcttgacatacaccggaaacacccagagatgggtgcccccttgtggtcggtgtacaggtggtgcatggctgtcgtcagctcgtgtcgtgagatgttgggttaagtcccgcaacgagcgcaacccttgtcccgtgttgccagcaggcccttgtggtgctggggactcacgggagaccgccggggtcaactcggaggaaggtggggacgacgtcaagtcatcatgccccttatgtcttgggctgcacacgtgctacaatggccggtacaaagagctgcgataccgcgaggtggagcgaatctcaaaaagccggtctcagttcggattggggtctgcaactcgaccccatgaagtcggagtcgctagtaatcgcagatcagcattgctgcggtgaatacgttcccgggccttgtacacaccgcccgtcacgtcacgaaagtcggtaacacccgaagccggtggcccaaccccttgtgggagggagctgtcgaaggtgggactggcgattgggacgaagtcgttacaaggtagccgtaccggaagg

SEQ ID NO: 1895 - DNA, 1483 bp, Streptomyces thermoviolaceus
gacgaacgctggcggcgtgcttaacacatgcaagtcgaacgatgaagccccttcgggggtggattagtggcgaacgggtgagtaacacgtgggcaatctgccctgcactctgggacaagccctggaaacggggtctaataccggatacgacacagggaggcatctcctctgtgtggaaagctccggcggtgcaggatgagcccgcggcctatcagcttgttggtgaggtaacggctcaccaaggcgacgacgggtagccggcctgagagggcgaccggccacactgggactgagacacggcccagactcctacgggaggcagcagtggggaatattgcacaatgggcgcaagcctgatgcagcgacgccgcgtgagggatgacggccttcgggttgtaaacctctttcagcagggaagaagcgcaagtgacggtacctgcagaagaagcgccggctaactacgtgccagcagccgcggtaatacgtagggcgcaagcgttgtccggaattattgggcgtaaagagctcgtaggcggcttgtcgcgtcggttgtgaaagcccggggcttaactccgggtctgcagtcgatacgggcaggctagagttcggtaggggagatcggaattcctggtgtagcggtgaaatgcgcagatatcaggaggaacaccggtggcgaaggcggatctctgggccgatactgacgctgaggagcgaaagcgtggggagcgaacaggattagataccctggtagtccacgccgtaaacggtgggcactaggtgtgggcagcattccacgttgtccgtgccgtagctaacgcattaagtgccccgcctggggagtacggccgcaaggctaaaactcaaaggaattgacgggggcccgcacaagcggcggagcatgtggcttaattcgacgcaacgcgaagaaccttaccaaggcttgacatacaccggaaacatccagagatgggtgcccccttgtggtcggtgtacaggtggtgcatggctgtcgtcagctcgtgtcgtgagatgttgggttaagtcccgcaacgagcgcaacccttgtcccgtgttgccagcaggcccttgtggtgctggggactcacgggagaccgccggggtcaactcggaggaaggtggggacgacgtcaagtcatcatgccccttatgtcttgggctgcacacgtgctacaatggccggtacaaagagctgcgataccgcgaggtggagcgaatctcaaaaagccggtctcagttcggattggggtctgcaactcgaccccatgaagtcggagtcgctagtaatcgcagatcagcattgctgcggtgaatacgttcccgggccttgtacacaccgcccgtcacgtcacgaaagtcggtaacacccgaagccggtggcccaaccccttgtgggagggagctgtcgaaggtgggactggcgattgggacgaagtcgtaacaaggtagccgtaccggaaggtgc

SEQ ID NO: 1896 - DNA, 1368 bp, Subdoligranulum variabile
  modified_base (23)..(23): a, c, t, g, unknown or other
  modified_base (25)..(25): a, c, t, g, unknown or other
  modified_base (44)..(44): a, c, t, g, unknown or other
  modified_base (1320)..(1320): a, c, t, g, unknown or other
gttatttcggttgaagttttcgnanggatactggtttaacttantggcgaacgggtgagtaacgcgtgagtaacctgccctggagtgggggacaacagttggaaacgactgctaataccgcataagcccacggtccggcatcggattgagggaaaaggatttattcgcttcaggatggactcgcgtccaattagctagttggtgaggtaacggcccaccaaggcgacgattggtagccggactgagaggttgaacggccacattgggactgagacacggcccagactcctacgggaggcagcagtgggggatattgcacaatgggggaaaccctgatgcagcgacgccgcgtggaggaagaaggttttcggattgtaaactcctgtcgttagggacgaatcttgacggtacctaacaagaaagcaccggctaactacgtgccagcagccgcggtaaaacgtagggtgcaagcgttgtccggaattactgggtgtaaagggagcgcaggcggaccggcaagttggaagtgaaatctatgggctcaacccataaattgctttcaaaactgctggccttgagtagtgcagaggtaggtggaattcccggtgtagcggtggaatgcgtagatatcgggaggaacaccagtggcgaaggcgacctactgggcaccaactgacgctgaggctcgaaagcatgggtagcaaacaggattagataccctggtagtccatgccgtaaacgatgattactaggtgttggaggattgaccccttcagtgccgcagttaacacaataagtaatccacctggggagtacgaccgcaaggttgaaactcaaaggaattgacgggggcccgcacaagcagtggagtatgtggttattcgaagcaacgcgaagaaccttaccaggtcttgacatccgatgcataatgcagatatgcatgaagtccttcgggacatcgagacaggtggtgcatggttgtcgtcagctcgtgtcgtgagatgttgggttaagtcccgcaacgagcgcaacccttattgccagttactacgcaagaggactctggcgagactgccgttgacaaaacggaggaaggtggggatgacgtcaaatcatcatgccctttatgacctgggctacacacgtactacaatggcgtttaacaaagagaagcaagaccgcgaggtggagcaaaactcaaaaacaacgtctcagttcagattgcaggctgcaactcgcctgcatgaagtcggaattgctagtaatcgcggatcagcatgccgcggtgaatacgttcccgggccttgtacacaccgcccntcacaccatgagagccggggggacccgaagtcggtagtctaaccgcaa

SEQ ID NO: 1897 - DNA, 1514 bp, Succinatimonas hippei
tgaagagtttgatcatggctcagattgaacgctggcggcaggcttaatacatgcaagtcgaacggtaacatagcgaaagcttgcttttgctgatgacgagtggcggacgggtgagtagtatctgggaaactgccctgaagagggggacaacagctggaaacggctgctaataccgcataaaccctgcgggggaaaggaaggcaacttccgcttcaggatgtgcccagaagggattagctagtaggtgaggtaaaggctcacctaggcgacgatctctagccggtctgagaggatgaccggccacatcgggactgagacacggcccggactcctacgggaggcagcagtagggaatattgcacaatggggggaaccctgatgcagccatgccgcgtgtgtgaagaaggccttcgggttgtaaagcactttcagcggggaggaaattaagttagacgttacccgcagaagaagcaccggctaactccgtgccagcagccgcggtaatacggagggtgcgagcgttaatcggaataactgggcgtaaagggcacgcaggcgggctgataagtaaggtgtgaaataccggggctcaacctcggggctgcattttaaactgtcagtctagagtattgcagagggagacggaattccgggtgtagcggtgaaatgcgtagatatccggaagaacaccggaggcgaaggcggtcttctgggcaaatactgacgctcaggtgcgaaagcgtggggagcaaacaggattagataccctggtagtccacgccgtaaacgatgtcgattaggagattgagcagaagcttggttttcggagcaaacgcgctaaatcgaccgcctggggagtacggccgcaaggttaaaactcaaatgaattgacgggggcccgcacaagcggtggagcatgtggtttaattcgatgcaacgcgaagaaccttacctgaccttgacatctgaggaatgcctgagagatttaggcagtgccttcgggagcctcaagacaggtgctgcatggctgtcgtcagctcgtgtcgtgagatgttgggttaagtcccgcaacgagcgcaacccttgtcctttgttgccagcgcgtgatggcgggaactcaaaggagactgccggtgacaaaccggaggaaggcagggatgacgtcaagtcatcatggcccttacggtcagggctacacacgtgctacaatggggcgtacagagggaagcgaggccgtgaggcggagcggagcccacaaagcgtcccacagttcggattggagtctgcaactcgactccatgaaggcggaatcgctagtaatcgcaaatcagaatgttgcggtgaatacgttcccgggccttgtacacaccgcccgtcacaccatgggagtggattgcaccagaagtggcttgcctaacccgtaagggagggcggttaccacggtgtggtttatgactggggtgaagtcgtaacaaggtaaccctaggggaacctggggttggatcacctcctta

SEQ ID NO: 1898 - DNA, 1391 bp, Sutterella morbirenis
cacatgcaagtcgaacggcagcacgaggagcttgctccttggtggcgagtggcgcacgggtgagtaatatatcggaacgtgtcctattgtgggggataactagccgaaaggttagctaataccgcataagacctgagggtgaaagcgggggatcttcggacctcgcgcagttggagcggccgatagccgattagctagttggtagggtaatggcctaccaaggcaacgatcggtagctggtctgagaggacgaccagccacactgggactgagacacggcccagactcctacgggaggcagcagtggggaattttggacaatgggggcaaccctgatccagccatgccgcgtgcaggatgaaggtcttcggattgtaaactgcttttgtcagggaagaaaagtttagagcgaataactctgaatgctgacggtacctgaagaataagcaccggctaactacgtgccagcagccgcggtaatacgtagggtgcaagcgttaatcggaattactgggcgtaaagcgtgcgcaggcggttctgtaagatgggtgtgaaagccccgggctcaacctgggaattgcattcatgactgcaggactagagttcaccagaggggggtggaattccaagtgtagcagtgaaatgcgtagatatttggaagaacaccgatggcgaaggcagccccctggggtgcgactgacgctcatgcacgaaagcgtggggagcaaacaggattagataccctggtagtccacgccctaaacgatgtctactggttgttggggatttatatccttggtaacgaagctaacgcgtgaagtagaccgcctggggagtacggtcgcaagattaaaactcaaaggaattgacggggacccgcacaagcggtggatgatgtggattaattcgatgcaacgcgaaaaaccttacctagccttgacatgtcgagaatcccgaagagatttgggagtgcccgcaagggaattcgaacacaggtgctgcatggctgtcgtcagctcgtgtcgtgagatgttgggttaagtcccgcaacgagcgcaacccttgtcattagttgctacgcaagagcactctaatgagactgccggtgacaaaccggaggaaggcagggatgacgtcaagtcctcatggcccttatggctagggcttcacacgtcatacaatggtcggaacagagggcagcgaagccgcgaggtggagccaatcccagaaaaccgatcgtagtccggattggagtctgcaactcgactccatgaagtcggaatcgctagtaatcgcggatcagcatgccgcggtgaatacgttcccgggtcttgtacacaccgcccgtcacaccatgggagtggggttcaccagaagacgttagtttaacc

SEQ ID NO: 1899 - DNA, 1489 bp, Sutterella parvirubra
attgaacgctggcggcatgctttacacatgcaagtcgaacggcagcacagggagcttgctcccgggtggcgagtggcgcacgggtgagtaagacatcggaacgtgtcctcttgtgggggataactacccgaaagggtggctaataccgcataagtcctgagggagaaagcgggggatcttcggacctcgcgcgagaggagcggccgatggccgattagctagttggtgaggtaaaggctcaccaaggcgacgatcggtagctggtctgagaggacgaccagccacactgggactgagacacggcccagactcctacgggaggcagcagtggggaattttggacaatgggcgaaagcctgatccagccatgccgcgtgtgggatgaaggccttcgggttgtaaaccacttttgtcagggacgaaaaggttcaggcyaataccttgaactgctgacggtacctgaagaataagcaccggctaactacgtgccagcagccgcggtaatacgtagggtgcaagcgttaatcggaattactgggcgtaaagcgtgcgcaggcggttctgtaagatagatgtgaaatccccgggcttaaccttggaattgcatttatgactgcaggactcgagtttgtcagaggggggtggaattccaagtgtagcagtgaaatgcgtagatatttggaagaacaccgatggcgaaggcagccccctgggacatgactgacgctcatgcacgaaagcgtggggagcaaacaggattagataccctggtagtccacgccctaaacgatgtctactggttgttggggacgatttggtccttggtaacgaagctaacgcgtgaagtagaccgcctggggagtacggtcgcaagattaaaactcaaaggaattgacggggacccgcacaagcggtggatgatgtggattaattcgatgcaacgcgaaaaaccttacctagccttgacatgtcggaaagctctgagagatcggagygtgcccgcaagggaatccgaacacaggtgctgcatggctgtcgtcagctcgtgtcgtgagatgttgggttaagtcccgcaacgagcgcaacccttgtcactagttgctacgaaagggcactctagtgagactgccggtgacaaaccggaggaaggtggggatgacgtcaagtcctcatggcccttatggctagggcctcacacgtcatacaatggtcggaacagagggcagcgaagccgcgaggtggagcaaatcccagaaaaccgatcgtagtccggattgcagtctgcaactcgactgcatgaagtcggaatcgctagtaatcgcggatcagcatgccgcggtgaatacgttcccgggtcttgtacacaccgcccgtcacaccatgggagtggggttcaccagaagacgtttgtctaaccgcaaggaggacggcgtccacggtgggtttcatgactggggtgaagtcgtaacaaggtagccgtaccggaagg

SEQ ID NO: 1900 - DNA, 1457 bp, Sutterella sanguinus
attgaacgctggcggcatgctttacacatgcaagtcgaacggcagcacgaggagcttgctccttggtggcgagtggcgcacgggtgagtaatatatcggaacgtgtcctattgtgggggataactagccgaaaggttagctaataccgcataagacctgagggtgaaagcgggggatcttcggacctcgcgcagttggagcggccgatagccgattagctagttggtagggtaatggcctaccaaggcaacgatcggtagctggtctgagaggacgaccagccacactgggactgagacacggcccagactcctacgggaggcagcagtggggaattttggacaatgggggcaaccctgatccagccatgccgcgtgcaggatgaaggtcttcggattgtaaactgcttttgtcagggaagaaaagtttagagcgaataactctgaatgctgacggtacctgaagaataagcaccggctaactacgtgccagcagccgcggtaatacgtagggtgcaagcgttaatcggaattactgggcgtaaagcgtgcgcaggcggttctgtaagatgggtgtgaaagccccgggctcaacctgggaattgcattcatgactgcaggactagagttcaccagaggggggtggaattccaagtgtagcagtgaaatgcgtagatatttggaagaacaccgatggcgaaggcagccccctggggtgcgactgacgctcatgcacgaaagcgtggggagcaaacaggattagataccctggtagtccacgccctaaacgatgtctactggttgttggggatttatatccttggtaacgaagctaacgcgtgaagtagaccgcctggggagtacggtcgcaagattaaaactcaaaggaattgacggggacccgcacaagcggtggatgatgtggattaattcgatgcaacgcgaaaaaccttacctagccttgacatgtcgagaatcccgaagagatttgggagtgcccgcaagggaattcgaacacaggtgctgcatggctgtcgtcagctcgtgtcgtgagatgttgggttaagtcccgcaacgagcgcaacccttgtcattagttgctacgcaagagcactctaatgagactgccggtgacaaaccggaggaaggcagggatgacgtcaagtcctcatggcccttatggctagggcttcacacgtcatacaatggtcggaacagagggcagcgaagccgcgaggtggagccaatcccagaaaaccgatcgtagtccggattggagtctgcaactcgactccatgaagtcggaatcgctagtaatcgcggatcagcatgccgcggtgaatacgttcccgggtcttgtacacaccgcccgtcacaccatgggagtggggttcaccagaagacgttagtttaaccgcaaggaggacgacgtccacggtgggcttcatgactggggtg

SEQ ID NO: 1901 - DNA, 1320 bp, Sutterella sp.
  YIT 12072
attgaacgctggcggcatgccttacacatgcaagtcgaacgagtggcgaacgggtgagtaatacatcggaacgtgtccgtttgtgggggacaaccagccgaaaggttggctaataccgcataaggaaaggcgcagacggagcggccgatgattgattagcttgttggcggggtaaaggcccaccaaggcgacgatcaatagctggtctgagaggacgaccagccacactggaactgagacacggtccagactcctacgggaggcagcagtggggaattttggacaatgggggcaaccctgatccagccatgccgcgtgcgggaagaaggccttcgggttgtaaaccgcttttgtcagggacgatgacggtacctgaagaataagcaccggctaactacgtgccagcagccgcggtaatacgtagggtgcaagcgttaatcggaattactgggcgtaaagcgtgcgcaggcggttgggtaagacagatgtgaaatccccgggcttaacctgggaactgcatttgtgactgtccgactggagtacgtcagaggggggtggaattccgcgtgtagcagtgaaatgcgtagatatgcggaagaacaccgatggcgaaggcagccccctgggacgactgacgctcatgcacgaaagcgtggggagcaaacaggattagataccctggtagtccacgccctaaacgatgtctgccggttgttggggcttcagtaacgaagctaacgcgtgaagcagaccgcctggggagtacggtcgcaagattaaaactcaaaggaattgacggggacccgcacaagcggtggatgatgtggattaattcgatgcaacgcgaaaaaccttacctagccttgacatgcacaggtgctgcatggctgtcgtcagctcgtgtcgtgagatgttgggttaagtcccgcaacgagcgcaacccttgtcatcagttgctacggcactctgatgagactgccggtgacaaaccggaggaaggtggggatgacgtcaagtcctcatggcccttatggctagggcctcacacgtcatacaatggtcggcagagggcagcgaagccgcgaggtgaagccaatcccagccgatcgtagtccggatgcagtctgcaactcgactgcagaagtcggaatcgctagtaatcgcggatcagcatgccgcggtgaatacgttcccgggtcttgtacacaccgcccgtcacaccatgggagtggggttcaccagaaggcgttgcccaaggcggcgcccacggtgggtttcatgactggggtgaagtcgtaacaaggtagtcgtaccggaagg

SEQ ID NO: 1902 - DNA, 1455 bp, Sutterella stercoricanis
ggcggcatgctttacacatgcaagtcgaacggcagcacagggagcttgctcctgggtggcgagtggcgcacgggtgagtaatacatcggaacgtgtcctattgtgggggataactgtcggaaagggtggctaataccgcataagacctgagggtgaaagcgggggatcgcaagacctcgcgcaattggagcggccgatgcccgattagctagttggtgaggtaatagcttaccaaggcgacgatcggtagctggtctgagaggacgaccagccacactgggactgagacacggcccagactcctacgggaggcagcagtggggaattttggacaatgggggcaaccctgatccagccatgccgcgtgcaggatgaaggtcttcggattgtaaactgcttttgtcagggacgaaaaggattgtgctaataccatgatctgctgacggtacctgaagaataagcaccggctaactacgtgccagcagccgcggtaatacgtagggtgcaagcgttaatcggaattactgggcgtaaagcgtgcgcaggcggttctgtaagacagatgtgaaatccccgggctcaacctgggaattgcatttgtgactgcaggactagagttcatcagaggggggtggaattccaagtgtagcagtgaaatgcgtagatatttggaagaacaccaatggcgaaggcagccccctgggatgcgactgacgctcatgcacgaaagcgtggggagcaaacaggattagataccctggtagtccacgccctaaacgatgtctactggttgttggggattaatatccttggtaacgaagctaacgcgtgaagtagaccccctggggagagcggtcgcaagattaaaactcaaaggaattgacggggacccgcacaagcggtggatgatgtggattaattcgatgcaacgcgaaaaaccttacgtagccttgacatgccaggaatcctgaagagatttgggagtgcccgcaagggaatctggacacaggtgctgcatggctgtcgtcagctcgtgtcgtgagatgttgggttaagtcccgcaacgagcgcaacccttgtcattagttgctacgcaagagcactctaatgagactgccggtgacaaaccggaggaaggtggggatgacgtcaagtcctcatggcccttatggctagggcctcacacgtcatacaatggtcggaacagagggcagcgaagccgcgaggtggagcaaatcccagaaaaccgatcgtagtccggattgcagtctgcaactcgactgcatgaagtcggaatcgctagtaatcgcggatcagcatgccgcggtgaatacgttcccgggtcttgtacacaccgcccgtcacaccatgggagtggggttcaccagaagacgtttgtctaaccgtaaggaaggacggcgtccacggtgggtttcatgactggggtgaagtcgt

SEQ ID NO: 1903 - DNA, 1537 bp, Sutterella wadsworthensis
ttgaactaaagagtttgatcctggctcagattgaacgctggcggcatgctttacacatgcaagtcgaacggcagcgcggggagcttgctccctggcggcgagtggcgcacgggtgagtaatacatcggaacgtgtcttctagtgggggataactgcccgaaagggcagctaataccgcatgagacctgagggtgaaagcgggggatcgcaagacctcgcgctggaagagcggccgatgtccgattagctagttggtgaggtaaaggctcaccaaggcgacgatcggtagctggtctgagaggacgaccagccacactgggactgagacacggcccagactcctacgggaggcagcagtggggaattttggacaatgggggcaaccctgatccagccatgccgcgtgcaggatgaaggtcttcggattgtaaactgcttttgtcagggacgaaaagggatgcgataacaccgcattccgctgacggtacctgaagaataagcaccggctaactacgtgccagcagccgcggtaatacgtagggtgcaagcgttaatcggaattactgggcgtaaagcgtgcgcaggcggttctgtaagatagatgtgaaatccccgggctcaacctgggaattgcatatatgactgcaggacttgagtttgtcagaggagggtggaattccacgtgtagcagtgaaatgcgtagatatgtggaagaacaccgatggcgaaggcagccctctgggacatgactgacgctcatgcacgaaagcgtggggagcaaacaggattagataccctggtagtccacgccctaaacgatgtctactagttgttggggacgatagtccttggtaacgcagctaacgcgtgaagtagaccgcctggggagtacggtcgcaagattaaaactcaaaggaattgacggggacccgcacaagcggtggatgatgtggattaattcgatgcaacgcgaaaaaccttacctagccttgacatgccaggaaggtctgagagatcaggccgtgcccgcaagggaatctggacacaggtgctgcatggctgtcgtcagctcgtgtcgtgagatgttgggttaagtcccgcaacgagcgcaacccttgtcattagttgctacgaaagggcactctaatgagactgccggtgacaaaccggaggaaggtggggatgacgtcaagtcctcatggcccttatggctagggcctcacacgtcatacaatggtcggaacagagggaagcgaagccgcgaggtgaagccaatcccagaaaaccgatcgtagtccggattgcagtctgcaactcgactgcatgaagtcggaatcgctagtaatcgcggatcagcatgccgcggtgaatacgttcccgggtcttgtacacaccgcccgtcacaccatgggagtggggttcaccagaagacgtttgcccaaccgaaaggaaggcggcgtccacggtgggcttcatgactggggtgaagtcgtaacaaggtagccgtaccggaaggtgcggctggatcacctccttt

SEQ ID NO: 1904 - DNA, 1328 bp, Synergistes sp.
  C1
gacgaacgctggcggcgtgcttaacacatgcaagttgagcgagcagcggacgggtgagtaaagcacaaggacttgtccgaaagagagggacacctgcgggaaaccggagctaatacctaataaaaaaggcgcttttggagagacttgtgtcctatcaggcagttggtgaggtaacggctcaccaaaccgaagacgggtagccggactgagaggtcgaccggccacattggaactgagagacggtccagactcctacgggaggcagcagtggggaatattgggcaatgggcgcaagcctgacccagcgacgccgcgtgagggaagacagccttcgggttgtaaacctctgttgcaggggaagatgacggtaccctgcgaggaagctccggctaactacgtgccagcagccgcggtaatacgtagggagcgagcgttgtccggaattactgggcgtaaagggcgcgtaggcggcgcttcaagtcgtctgtcaaaagccgaggctcaacctcggtgcgcagacgaaactggagagcttgagaagcagagaggcaaacagaattcctggtgtagcggtgaaatgcgtagatatcaggaagaataccagtggcgaaggcggtttgctggctgctctaacgctgaagcgcgaaagccaggggagcaaacgggattagataccccggtagtcctggcagtaaacgatgtatgctgggtgtgggacgttccgtgccgaagttgacgcgataagcataccgcctggggagtacggtcgcaagattgaaactcaaaggaattgacgggggcccgcacaagcggtggagcacgtggtttaattcgatgcaaaccgaagaaccttacctggacttgacatcaacaggtgctgcatggctgtcgtcagctcgtgtcgtgagatgttgggttaagtcccgcaacgagcgcaacccctattgccggttgctaccagctgagcactccggcgagactgccatcgacaagatggaggaaggtggggacgacgtcaagtcatcatggcccatatgtccagggcgacacacatgctacaatggatggcagagagaagcgagaccgaaaggagaagcagatcccaaccatccccagttcggatgcagtctgcaactcgactgcagaagttggaatcgctagtaatcgcggatcagccaagccgcggtgaatacgttcccgggccttgtacacaccgcccgtcacaccatccgagtcgggtgctctcaaagccggagcctaaggatccgcctaaagagtgtccggtgaggggggtgaagtcgtaacaaggtagccgtacgggaacgtgc

SEQ ID NO: 1905 - DNA, 1412 bp, Synergistes sp.
  RMA 14551
tggcgaacgaagacctagaggagcttgctttaatatggttttagtggcggacgggtgagtaacgcgtgaggacttgtcgagtacagggggacaacaggtggaaacgtctgctaataccccataagccttcgggtaaaaggagcgatccggtacacgagagacttgtgtcctatcagctagtaggtggggtaacgagcccacccaggccaagacggatagccggactgagaggtcgatcggccacactggaactgagacacggtccagactcctacgggaggcagcagtggggaatattgggcaatgggggcaaccctgacccagcgacgccgcgtgagkgaagamakccytcgggwtgtaaamctctgttgcwgtgggaagataggacgtgacggtaccactrcgaggaagccccggcaaactacgtgccagcagccgcggtaatacgtagggagcgagcgttatccggaattactgggcgtaaagcggcgcgtaggctggtgttcaagtcgttcgttaaatattgaggcttaacctcaaggagctggccgaaactgagacactggagacacagagaggcaaacagaattcctggtgtagcggtgaaatgcgtagatatcaggaagaataccggtggcgaaggcggtttgcttggatgtgatctgacgcttgaagcgcgaaagccgggggagcgaacgggattagataccccggtagtcccggcagtaaactgatgtatgctgggtgtggccgtagcgatacagccgtgccgaagttaacgcgataagcataccgcctggggagtactggtcgcaagattgaaactcaaaggaattgacgggggcccgcacaagcggtggagcacgtggtttaattcgatgcaaaccgaagaaccttacctggacttgacatacacgtagtagcgaatcgaaagaggagcgaggatgtagcaatacattcagcgtgaacaggtgctgcatggcttgtcgtcagctcgtgtcgtgagatgttgggttaagtcccgcaacgagcgcaaccccttgttgccggttgctaacgcgcaaaggcgagcactccggcgagactgccatcgacaagatggaggaaggtggggacgacgtcaagtcatcatggcccttatgtccagggcgacacacatgctacaatggctggtacagagagaagcgaagccgagaggccgagcagatcccatcaaagccagtcccagttcggattgcagtctgcaactcgactgcatgaagttggaatcgctagtaatcgcggatcagccaagccgcggtgaatacgttcccgggccttgtacacaccgcccgtcacaccatccgagttgggtgctctcgaagtcggaggcttaaccgcaaggaaaagatccgcctaaagagtgtccggtg

SEQ ID NO: 1906 - DNA, 1432 bp, Synergistetes bacterium ADV897
gaagcgacgctggcggcgtgcctaacacatgcaagttgagcggagagttttcgaagaagacttcggttggaattggaaacgatcagcagcggacgggtgagtaaagcacaaggacgtatccttttgagggggacaactgcgggaaaccggagctaatagcccataagccgagaggtgaaagcgcgcaagcgcgcaagaggagcgacttgtgtcctatcaggcagttggtgaggtaagagctcaccaaaccgaagacgggtagccggactgagaggttgtacggccacattggaactgagagacggtccagactcctacgggaggcagcagtggggaatattgggcaatgggggcaaccctgacccagcgacgccgcgtgagggaagacagccttcgggttgtaaacctctgttgcaggggaagaaggacgtgacggtaccctgcgaggaagctccggctaactacgtgccagcagccgcggtaatacgtagggagcgagcgttatccggaattactgggcgtaaagggcgcgtaggcggtgtttcaagtcgttcgttaaatattgaggcttaacctcaaggagcggccgaaactgagacactggagacacagagaggcaaacagaattcctggtgtagcggtgaaatgcgtagatatcaggaagaataccggtggcgaaggcggtttgctggatgtgatctgacgctgaagcgcgaaagccgggggagcgaacgggattagataccccggtagtcccggcagtaaacgatgtatgctgggtgtggccgtagcgatacagccgtgccgaagttaacgcgataagcataccgcctggggagtacggtcgcaagattgaaactcaaaggaattgacgggggcccgcacaagcggtggagcacgtggtttaattcgatgcaaaccgaagaaccttacctggacttgacatacacgtagtagcgaatcgaaagaggagcgaggatgtatcaatgcattcagcgtgaacaggtgctgcatggctgtcgtcagctcgtgtcgtgagatgttgggttaagtcccgcaacgagcgcaacccctgttgccggttgctaacgcgcaaaggcgagcactccggcgagactgccatcgacaagatggaggaaggtggggacgacgtcaagtcatcatggcccctatgtccagggcgacacacatgctacaatggctggtacagagagaagcgaagccgagaggccgagcagatcccatcaaagccagtcccagttcggattgcagtctgcaactcgactgcatgaagttggaatcgctagtaatcgcggatcagccaagccgcggtgaatacgttcccgggccttgtacacaccgcccgtcacaccatccgagttgggtgctctcgaagtcggaggcttaaccgcaaggaaagatccgcctaaag

SEQ ID NO: 1907 - DNA, 1447 bp, Synergistetes bacterium LBVCM1157
cccggacgacgctggcggcgtgcctaacacatgcaagtcgaacgaaattacgaagaaagcttgctttaatcgtaatttagtggcggacgggtgagtaacgcgtgaggacttgtcggatacagggggacaacagatggaaacgtctgctaataccccataagccttcgggtaaaaggagcaatccggtatttgagagactcgcgttctatcagctagtaggtggggtaacggcccacctaggccaagacggatagccggactgagaggtcgaccggccacactggaactgagagacggtccagactcctacgggaggcagcagtggggaatattgggcaatgggggcaaccctgacccagcgacgccgcgtgggtgaagaaatccttcgggatgtaaagccctgttgtgtgggaagataatgacggtaccacacgaggaagccccggcaaactacgtgccagcagccgcggtaatacgtagggggcaagcgttgttcggaattactgggcgtaaagcgcacgcaggctgaccgttaagtctgtcgtcaaaggcggaggctcaacctccgttctacgatagatactgtcggtctagagtatgtgagagggaagtggaattcccggtgtagcggtgaaatgcgtagatatcgggaggaacaccagtggcgaaggcggcttcctggcacacaactgacgctcatgtgcgaaagccagggcagcgaacgggattagataccccggtagtcctggccgtaaacgatggatactgggtgtgggtgaagcagttcatccgtgccgtagttaacgcgttaagtatcccgcctggggactacggtcgcaagactgaaactcaaaggaattgacgggggcccgcacaagcggtggagcacgtggtttaattcgatgcaaaccgaagaaccttacctgggtttgacatacaagtggtactgagatgaaagttgagggactgtagcttgctacagagcttgaacaggtgctgcatggctgtcgtcagctcgtgtcgtgagatgttgggttaagtcccgcaacgagcgcaacccctatgtccagttgctaacaagtgaagttgagcactctggagagactgccgccgacaaggcggaggaaggtggggatgacgtcaagtcatcatggcctttatgcccagggcgacacacgtgctacaatggccggcacagaaggcagcttgctagtgatagttggcgaatccttaaaagccggtcccagttcggattgtagtctgcaacccgactacatgaagccggaatcgctagtaatcgcagatcagccaagctgcggtgaatacgttcccgggccttgtacacaccgcccgtcacaccacccgagttgggggcacccgatagccgcaggctataaccgcagtaagggaaagaagcgtctaaggtgcgcgcgagtaacagcatctc

SEQ ID NO: 1908 - DNA, 1474 bp, Synergistetes bacterium oral clone 03 5 D05
gacgaacgctggcggcgtgcctaatacatgcaagtagaacgctgaaggaaggagcttgctctttccggatgagttgcgaacgggtgagtaacgcgtaggtaacctgcctggtagcgggggataactattggaaacgatagctaataccgcataatagcagttattgcatgataactgtttgaaaggtgcaaatgcatcactaccagatggacctgcgttgtattagctagttggtgaggtaacggctcaccaaggcgacgatacatagccgacctgagagggtgatcggccacactgggactgagacacggcccagactcctacgggaggcagcagtagggaatcttcggcaatggacggaagtctgaccgagcaacgccgcgtgagtgaagaaggttttcggatcgtaaagctctgttgtaagagaagaacgagtgtgagagtggaaagttcacactgtgacggtatcttaccagaaagggacggctaactacgtgccagcagccgcggtaatacgtaggtcccgagcgttgtccggatttattgggcgtaaagcgagcgcaggcggttagataagtctgaagttaaaggctgtggcttaaccatagtacgctttggaaactgggagacttgagtgcagaagaggagagcggaattccatgtgtagcggtgaaatgcgtagatatatggaggaacaccagtggcgaaggcggctctctggtctgtaactgacgccgaggctcgaaagcgtggggagcaaacaggattagataccctggtagtccatgccgtaaacgttgggcactaggtgtgggggacattccacgttttccgcgccgtagctaacgcattaagtgccccgcctggggagtacggccgcaaggctaaaactcaaaggaattgacgggggcccgcacaagcggcggagcatgcggattaattcgatgcaacgcgaagaaccttaccaaggcttgacatgcattagatcgcgtcagagatggcgtttcccttcggggctggtatacaggtggtgcatggttgtcgtcagctcgtgtcgtgagatgttgggttaagtcccgcaacgagcgcaaccctcgttctatgttgccagcacgtgatggtggggactcataggagactgccggggtcaactcggaggaaggtggggatgacgtcaaatcatcatgccccttatgtcttgggcctcacgcatgctacaatggccggtacagagggttgcgatactgtgaggtggagctaatccctaaaagccggtctcagttcggattggggtctgcaactcgaccccatgaagtcggagtcgctagtaatcgcagatcagcaacgctgcggtgaatacgttcccgggccttgtacacaccgcccgtcaagtcacgaaagttggtaacacccgaagccggtggcctaaccctggtggggggagccgtcgaaggtgggactggcgattgggact

SEQ ID NO: 1909 - DNA, 1453 bp, Synergistetes bacterium oral taxon 362
gatgaacgctggcggcgtgcgtaacacatgcaagttggacgacgatgccatgaagtggtaacacggaatggtatacggagtagcggacgggtgagtaaaacatgaggagctgtcctgttgagggggataacgttcggaaacggaccctaataccccataggccgagaggttaaaggcagagatgcgcgacaggaggcactcgtgtcctatcagctggttggtgaggtaacggctcaccaaggcgacgacgggtagccggcctgagagggtgaccggccacactggaactgagacacggtccagactcctacgggaggcagcagtggggaatattgggcaatgggaggaatcctgacccagcgacgccgcgtgaacgaagacggccttcgggttgtaaagttcttttatgtgggaagaatgaagtgacggtaccacatgaataagccccggctaactacgtgccagcagccgcggtaatacgtagggggcgagcgttgtccggaattactgggcgtaaagggcacgcaggctgtgcttcaagtcagctgtaaaaggatgcggcttaaccgtgttatgcagttgagactgaggtgctggaataccggagaggcaagtggaattcccagtgtagcggtgaaatgcgtagatattgggaagaacatcggtggcgaaggcgacttgctggacggtaactgacgctgaggtgcgaaagccagggtagcgaacgggattagataccccggtagtcctggccgtaaacgatgaatgctaggtgtgcgagcagagatgttggtgtgccgcagttaacgcgataagcattccgcctggggagtacggtcgcaagattgaaactcaaaggaattgacgggggcccgcacaagcggtggagcacgtggtttaattcgatgcaaaccgaagaaccttacctgggtttgacatgtatgtggtaggagatggaaacattgacgacgctgctttcgggcagtgagcatacacaggtgctgcatggctgtcgtcagctcgtgtcgtgagatgttgggttaagtcccgcaacgagcgcaacccctgcgattagttgccagcgagttaagtcgggcactctaatgggactgccatcgacaagatggaggaaggtggggatgacgtcaagtcatcatggcccttatgtccagggcgacacacgtgctacaatggccggtacagagggaagcgaggctgtgaggttgagcggatcccataaagccggtctcagtccggattgaagtctgcaattcgacttcatgaagctggaatcgctagtaatcgcagatcagccaagctgcggtgaatacgttcccgggccttgtacacaccgcccgtcacaccacccgagccgggtgtacccgaagccggtggcctaaccttatgggaggagccgtcgaaggtgtgtctggtgaggagggtgaagtcgtaa

SEQ ID NO: 1910 - DNA, 1337 bp, Synergistetes bacterium oral taxon D48
gatgaacgctggcggcgtgcgtaacacatgcaagttgaacgacggtgccatgaagtggtaacacggagtggtatacggagtagcggacgggtgagtaaagcatgagaatctgtcctgtcgagggggatagcgttcggaaacggaccctaataccccatagtccgagaggttaaaggcagcgatgcgcggcaggaggagctcgtgtcctatcagctggttggtgaggtaacggctcaccaaggcaacgacgggtagccggcctgagagggtgaccggccacactggaactgagaaacggtccagactcctacgggaggcagcagtggggaatattgggcaatgggaggaatcctgacccagcgacgccgcgtgaacgaagacggccttcgggttgtaaagttcttttatgtgggaagaaggaagtgacggtaccacatgaataagccccggctaactacgtgccagcagccgcggtaatacgtagggggcgagcgttgtccggaattactgggcgtaaagggcacgcaggctgtgcttcaagtcagctgtaaaaggatgcggcttaaccgtgttatgcggctgagactgaggtgctggagtaccggagaggcaagtggaattcccagtgtagcggtgaaatgcgtagatattgggaagaacatcggtggcgaaggcgacttgctggacggtaactgacgctgaggtgcgaaagccagggtagcgaacgggattagataccccggtagtcctggccgtaaacgatgaatgctaggtgtgcgagcagagatgttggtgtgccgcagttaacgcgataagcattccgcctggggagtacggtcgcaagattgaaactcaaaggaattgacgggggcccgcacaagcggtggagcatgtggtttaattcgatggtacgcgaggaaccttacctgggtttgacatagtatctgatgccgtagagatacggcagcgtagcaatacgaggtacaacgggtgctgcatggctgtcgtcagctcgtgtcgtgagatgttaggttaagtcctgcaacgagcgcaaccctcgtcgtatattgccagcggttcggccgggcactctggcaggactgccatcgacaagattggaggaaggtggggatgacgtcagtcatcatggcccatatgtccagggcgacacacgtgctacaatgggcggtacagagggaagcgacactgcgaggtgaagcggatcccattaaagccgctctcagttcggattgaagtctgcaattcgacttcatgaagttggaatcgctagtaatcgcagatcagccaagctgcggtgaatccgttcccgggccttg

SEQ ID NO: 1911 - DNA, 1535 bp, Syntrophococcus sucromutans
agagtttgatcatggctcaggatgaacgctggcggcgtgcttaacacatgcaagtcgagcgaagcacttttgatttcttcggattgaaggagtgactgagcggcggacgggtgagtaacgcgtggggaacctgccccataccgggggataacagttggaaacgactgctaataccgcataagcgcacaggaaggcatcttccagtgtgaaaaactccggtggtatgggatggacccgcgttggattagccagttggtggggtaacggcctaccaaagcgacgatccatagccggcctgagagggcgaccggccacattgggactgagacacggcccaaactcctacgggaggcagcagtggggaatattgcacaatgggggaaaccctgatgcagcgacgccgcgtgagtgatgaagtatttcggtatgtaaagctctatcagcagggaagaagacgacggtacctgactaagaagccccggctaactacgtgccagcagccgcggtaatacgtagggggcaagcgttatccggatttactgggtgtaaagggagcgcagacggcagtgcaagtctgaagtgaaaacccgaggctcaaccacgggattgctttggaaactgtacagctagagtgtcggaggggtaagcggaattcctagtgtagcggtgaaatgcgtagatattaggaggaacaccggtggcgaaggcggcttactggacgataactgacgttgaggctcgaaagcgtggggagcaaacaggattagataccctggtagtccacgcggtaaacgatgaatactaggtgttggcacgcaaggcgtgtcggtgccgccgcaaacgcattaagtattccacctggggagtacgttcgcaagaatgaaactcaaaggaattgacggggacccgcacaagcggtggagcatgtggtttaattcgaagcaacgcgaagaaccttaccaagtcttgacatccgcctgaccggccggtaacgcggcccttccttcgggacaggcgagacaggtggtgcatggttgtcgtcagctcgtgtcgtgagatgttgggttaagtcccgcaacgagcgcaacccttatcctcagtagccagcacgaaaggtgggcactctggggagactgccagggagaacctggaggaaggtggggatgacgtcaaatcatcatgccccttatgatttgggctacacacgtgctacaatggcgtgaacagagggaagcgaaggggcgatccggagcaaatctcaaaaaacacgtcccagttcggactgcaggctgcaacccgcctgcacgaagctggaatcgctagtaatcgcagatcagaatgctgcggtgaatatgttcccgggtcttgtacacaccgcccgtcacaccatgggagtcggtaatgcccgaagcctgtgacccaaccagcaatggagggagcagtcgaaggcagggccggtgactggggtgaagtcgtaacaaggtagccgtatcggaaggtgcggctggatcacctccttaagcttggtacccggg

SEQ ID NO: 1912 - DNA, 1295 bp, Syntrophomonadaceae sp.
  P1
acgaacgctggcggcgtgcttaacacatgcaagtcgaacgagtggcgaacgggtgagtaacgcatgagtaatctgcccataagcgggggataccaaatggaaacatttgctaataccgcatacggaaagccacttatggatgagctcgcgtctgattagctggttggcagggtaaaggcctaccaaggcaacgatcagtagccggcctgagagggtgaccggccacactgggactgagacacggcccagactcctacgggaggcagcagtggggaatattgcgcaatgggggaaaccctgacgcagcgacgccgcgtgagcgaagaaggccttagggttgtaaagctctgttttaagggacgaagacggtaccttaagaggaagccccggctaactacgtgccagcagccgcggtaagacgtagggggcgagcgttgtccggaatcactgggtgtaaagggcacgcaggcgggtgtttaagtcattcgtgaaataccgcagcttaactgcggggttgcgagtgaaactggaaatcttgagggcaagagaggacagtagaattcctggtgtagcggtgaaatgcgtagaaatcaggaggaataccggtggcgaaggcgactgtctggattgcctgacgctgaggtgcgaaagcgtgggtagcaaacaggattagataccctggtagtctacgctgtaaacgatggatactaggtgtaggagcttctgtgccggagcaaacgcaataagtatcccacctggggagtacgatcgcaaggttgaaactcaaaggaattgacgggggcccgcacaagcggtgagcatgtggtttaattcgatgcaacgcgaagaaccttaccaggtcttaacatcgacaggtggtgcatggttgtcgtcagctcgtgtcgtgagatgttgggttaagtcccgcaacgagcgcaacccctgccattagttactaacaattgaggactctaatgggaccgcctgtgacaagcaggaggaaggtggggatgacgtcaaatcatcatgccctttatgatctgggctacacacgtgctacaatggatggcaaagagcagcaaagcagcgatgccgagccaatctcatccattcccagttcggatggagtctgcaactcgacttcagaagcaggaatcgctagtaatcgtggatcagcatgccacggtgaatgcgttcccgggccttgtacacaccgcccgtcacaccacgaaagtcggcaacacccgaagccggtagctaggcagccgttgaaggtggggttggtgattggggtg

SEQ ID NO: 1913 - DNA, 1451 bp, Tannerella forsythia
agcgataggcttaacacatgcaagtcgaggggcatcgagggtagcaatacctgtcggcgaccggcgcacgggtgagtaacgcgtatgtaacctgcccgcaacagagggataacccggcgaaagtcggactaatacctcataaaacaggggttccgcatggggctatttgttaaagatttattggttgcggatgggcatgcgtaccattaggtagttggtgaggtaacggctcaccaagccatcgatggttaggggttctgagaggaaggtcccccacactggtactgagacacggaccagactcctacgggaggcagcagtgaggaatattggtcaatgggcgagagcctgaaccagccaagtcgcgtgaaggatgactgccctatgggttgtaaacttcttttacaggggaataaaatgagatacgtgtattttattgcatgtaccttgtgaataagcatcggctaactccgtgccagcagccgcggtaatacggaggatgcgagcgttatccggatttattgggtttaaagggtgcgtaggtgggctgttaagtccgcggtgaaagtttgtcgcttaacgataaaattgccgttgaaactggtagtcttgagtatagatgaagtaggcggaatgcgtggtgtagcggtgaaatgcatagagatcacgcagaactccgattgcgaaggcagcttactaaggtataactgacactgaagcacgaaagcgtgggtatcaaacaggattagataccctggtagtccacgcagtaaacgatgattactaggagtttgcgatatagtgtaagctctacagcgaaagcgttaagtaatccacctggggagtacgccggcaacggtgaaactcaaaggaattgacgggggcccgcacaagcggaggaacatgtggtttaattcgatgatacgcgaggaaccttacccgggattgaaatgtagacgacggagagtgagagctttcttcccttcggggcgtctatgtaggtgctgcatggttgtcgtcagctcgtgccgtgaggtgtcggcttaagtgccataacgagcgcaaccctgactgtcagttgctaacaggtaaagctgaggactctggcgggactgccggcgtaagctgtgaggaaggttgggatgacgtcaaatcagcacggcccttacatccggggcgacacacgtgttacaatggcagggacaaagggcagctaccgggcgaccggatgccaatctccaaaccctgtctcagttcggatcggagtctgcaactcgactccgtgaagctggattcgctagtaatcgcgcatcagccatggcgcggtgaatacgttcccgggccttgtacacaccgcccgtcaagccatgggagccgggggtacctgaagtccgtaaccgcgaggatcggcctagggtaaaactggtgactggggctaagtcgtaacaagg

SEQ ID NO: 1914 - DNA, 1375 bp, Tannerella sp.
  6_1_58FAA_CT1
caacatggtatcagcttgctgatactgatggcgaccggcgcacgggtgagtaacgcgtatgtaatctacctgtaacagagggataacccggagaaatccggactaatacctcatagcacatattattcgcatgaattttatgttaaagagactcggttacagatgaacatgcgttccattagctagttggcggggttacggcccaccaaggcaacgatggataggggttctgagaggaaggtcccccacactggtactgagacacggaccagactcctacgggaggcagcagtgaggaatattggtcaatgggcgaaagcctgaaccagccaagtcgcgtggaggaagacggccctacgggttgtaaactccttttacctgggaataacgggcgctacgtgtagcgctgtgcaagtaccgggagaataagcatcggctaattccgtgccagcagccgcggtaatacggaagatgcgagcgttatccggatttattgggtttaaagggtgcgtaggcggaagaataagtcagcggtgaaatgcttcagctcaactggagaattgccgatgaaactgtttttctagagtataaaagaggtatgcggaatgcgtggtgtagcggtgaaatgcatagatatcacgcagaaccccgattgcgaaggcagcatactgggctataactgacgctgaagcacgaaagcgtgggtatcgaacaggattagataccctggtagtccacgccgtaaacgatgaatactaactgtttgcgatataatgtaagcggtacagcgaaagcgttaagtattccacctggggagtacgccggcaacggtgaaactcaaaggaattgacgggggcccgcacaagcggaggaacatgtggtttaattcgatgatacgcgaggaaccttacccgggctcaaacgacaggggaataatcccgaaaaggattagccagcaatgggcgctgtcgaggtgctgcatggttgtcgtcagctcgtgccgtgaggtgtcggcttaagtgccataacgagcgcaacccttaccggtagttactaacaggtcaagctgaggactctaccgggactgccagcgcaagctgcgaggaaggtggggatgacgtcaaatcagcacggcccttacgtccggggcgacacacgtgttacaatggcaggtacagagagtcgcttcgtagcaatacgtagccaatcccaaaaacctgtctcagttcggatcggagtctgcaactcgactccgtgaagctggattcgctagtaatcgcgcatcagccatggcgcggtgaatacgttcccgggccttgtacacaccgcccgtcaagccatgggagccgggagtacctgaagtatgcaaccgcaa

SEQ ID NO: 1915 - DNA, 1474 bp, Tatlockia micdadei
  modified_base (5)..(5): a, c, t, g, unknown or other
  modified_base (12)..(14): a, c, t, g, unknown or other
  modified_base (29)..(30): a, c, t, g, unknown or other
  modified_base (37)..(37): a, c, t, g, unknown or other
  modified_base (48)..(48): a, c, t, g, unknown or other
  modified_base (80)..(80): a, c, t, g, unknown or other
  modified_base (82)..(88): a, c, t, g, unknown or other
  modified_base (117)..(117): a, c, t, g, unknown or other
  modified_base (130)..(130): a, c, t, g, unknown or other
  modified_base (136)..(137): a, c, t, g, unknown or other
  modified_base (163)..(163): a, c, t, g, unknown or other
  modified_base (169)..(169): a, c, t, g, unknown or other
  modified_base (176)..(176): a, c, t, g, unknown or other
  modified_base (179)..(179): a, c, t, g, unknown or other
  modified_base (222)..(224): a, c, t, g, unknown or other
  modified_base (229)..(229): a, c, t, g, unknown or other
  modified_base (249)..(249): a, c, t, g, unknown or other
  modified_base (304)..(304): a, c, t, g, unknown or other
  modified_base (335)..(335): a, c, t, g, unknown or other
  modified_base (420)..(420): a, c, t, g, unknown or other
  modified_base (426)..(426): a, c, t, g, unknown or other
  modified_base (452)..(452): a, c, t, g, unknown or other
  modified_base (479)..(479): a, c, t, g, unknown or other
  modified_base (508)..(508): a, c, t, g, unknown or other
  modified_base (552)..(552): a, c, t, g, unknown or other
  modified_base (571)..(571): a, c, t, g, unknown or other
  modified_base (589)..(591): a, c, t, g, unknown or other
  modified_base (598)..(598): a, c, t, g, unknown or other
  modified_base (625)..(625): a, c, t, g, unknown or other
  modified_base (652)..(653): a, c, t, g, unknown or other
  modified_base (828)..(828): a, c, t, g, unknown or other
  modified_base (886)..(886): a, c, t, g, unknown or other
  modified_base (945)..(945): a, c, t, g, unknown or other
  modified_base (957)..(959): a, c, t, g, unknown or other
  modified_base (983)..(983): a, c, t, g, unknown or other
  modified_base (993)..(993): a, c, t, g, unknown or other
  modified_base (1042)..(1042): a, c, t, g, unknown or other
  modified_base (1092)..(1092): a, c, t, g, unknown or other
  modified_base (1117)..(1117): a, c, t, g, unknown or other
  modified_base (1213)..(1213): a, c, t, g, unknown or other
  modified_base (1276)..(1276): a, c, t, g, unknown or other
  modified_base (1287)..(1287): a, c, t, g, unknown or other
  modified_base (1296)..(1296): a, c, t, g, unknown or other
  modified_base (1302)..(1302): a, c, t, g, unknown or other
aactnaagagtnnnatcctggctcagatnnaacgctngcggcatgctnaacacatgcaagtcgaacggcagcacggtctngnnnnnnnatgggtgacgagtggcgaacgggtgagtnacgcgtaggaatntgcctnnaagtgtgggataacttggggaaactnaagctnataccgnatnagctctaaggaggaaagctggggaccgcgaggcctgcgcgctnnnagatnagcctgcgtccgattagctngttggtgggggaagggcctaccaaggcgacgatcggtagctggtctgagaggatnatcagccacactgggactgagacacggcccngtctcctacgggaggcagcagtggggaatattggacaatggggggaaccctratccagcaatgccgcgtgtgtgaagaaggcctnagggtngtaaagcactttcagtggggaggagngrtgataggttaagagctaattatctngacgttacccacagaagaagcaccggctnactccgtgccagcagccgcggtaatacggagggtgcgagcgttnatcggaattactgggcgtnaagggtgcgtaggtggtnnnataagtnatctgtgaaattcctgggctcaacctngggtggtcagataagactgtgagactnngagtataggagagggtagtggaatttccggtgtagcggtgaaatgcgtagagatcggaaggaacaccagtggcgaaggcggctacctggcctaatactgacactgaggcacgaaagcgtggggagcaaacaggattagataccctggtagtccacgctgtaaacgatgtcaactngttgttggccttatgaatgaggttagtgacgaagcaaacgcgataagttgaccgcctngggagtacggtcgcaagatyaaaactcaaaggaattgacgggggcccgcacaagcggtngagcatgtggtnnnattcgatgcaacgcgaagaacctnacctaccctngacatacagtgaattctgcagagatgtggaagtgccgcgaggagcactnatacaggtgctgcatggctgtcgtcagctcgtgtcgtgagatgttgggtnaagtcccgtaacgagcgcaaccctngtycttagttgccagcgcgtagatggyggggactctaaggagactgccggtgacaaaccggaggaaggcggggatgacgtcaagtcatcatggccnttacgggtagggctacacacgtgctacaatggccggtacagagggcggcgaaggggagacctngagcaaatctntgaaagctngtcgtngtccggattgaagtctgcaactcgactkcatgaagtcggaatcgctagtaatcgcgaatcagcatgtcgcggtgaatacgttcccgggccttgtacacaccgcccgtcacaccatgggagtgggttgcaccagaagtagatagtctaaccaatgggggacgtataccacggt

SEQ ID NO: 1916 - DNA, 1480 bp, Tatumella ptyseos
ggcggcaggcctaacacatgcaagtcgaacggtagcacagaggagcttgctccttgggtgacgagtggcggacgggtgagtaatgtctgggaaactgcctgatggagggggataactactggaaacggtagctaataccgcataatgtcgcaagaccaaagcgggggaccttcgggcctcgcaccatcggatgtgcccagatgggattagcttgtaggtgaggtaatggctcacctaggcgacgatccctagctggtctgagaggatgaccagccacactggaactgagacacggtccagactcctacgggaggcagcagtggggaatattgcacaatgggcgcaagcctgatgcagccatgccgcgtgtatgaagaaggccttcgggttgtaaagtactttcagcggggaggaaggcagtcgtgttaatagcacgattgattgacgttacccgcagaagaagcaccggctaactccgtgccagcagccgcggtaatacggagggtgcaagcgttaatcggaattactgggcgtaaagcgcacgcaggcggtctgtcaagtcggatgtgaaatccccgggctcaacccgggaactgcattcgaaactggcagactagagtcttctagaggggggtagaattccaggtgtagcggtgaaatgcgtagagatctggaggaataccggtggcgaaggcggccccctggacaaagactgacgctcaggtgcgaaagcgtggggagcaaacaggattagataccctggtagtccacgccgtaaacgatgtcgacttggaggctgttcccttgaggagtggcttccggagctaacgcgttaagtcgaccgcctggggagtacggccgcaaggttaaaactcaaatgaattgacgggggcccgcacaagcggtggagcatgtggtttaattcgatgcaacgcgaagaaccttacctactcttgacatccagagaacttgccagagatggattggtgccttcgggaactctgagacaggtgctgcatggctgtcgtcagctcgtgttgtgaaatgttgggttaagtcccgcaacgagcgcaacccctatcctttgttgccagcgattcggtcgggaactcaaaggagactgccggtgataaaccggaggaaggtggggatgacgtcaagtcatcatggcccttacgagtagggctacacacgtgctacaatggcgcatacaaagagaagcgacctcgcgagagcaagcggacctcataaagtgcgtcgtagtccggattggagtctgcaactcgactccatgaagtcggaatcgctagtaatcgtagatcagaatgctacggtgaatacgttcccgggccttgtacacaccgcccgtcacaccatgggagtgggttgcaaaagaagtagatagcttaaccttcgggagggcgtttaccactttgtgattcatgactggggtgaagtcgtaacaaggtaaccgtagggg

SEQ ID NO: 1917 - DNA, 1479 bp, Tessaracoccus sp.
  oral taxon F04
agagtttgatcctggctcaggacgaacgctggcggcgtgcttaacacatgcaagtcgaacggtaaggccctttcgggggtacacgagtggcgaacgggtgagtaacacgtgagtaacctgcccttgactctgggataacatctggaaacaggtgctaatactggatattctgcgatgcctgcatgggtgtcgttggaaagttccggcggtcagggatggactcgcggcctatcagcttgttggtgaggtagtggctcaccaaggcttcgacgggtagccggactgagaggttgaccggccacattgggactgagatacggcccaaactcctacgggaggcagcagtggggaatattgcacaatggacggaagtctgatgcagcaacgccgcgtgcgggatgacggccttcgggttgtaaaccgctttcatccatgacgaagcgagagtgacggtagtgggagaagaagcaccggctaactacgtgccagcagccgcggtgatacgtagggtgcgagcgttgtccggatttattgggcgtaaagagcttgtaggcggtttgttgcgtcgggagtgaaaactcagggcttaaccctgagcctgctttcgatacgggcagacttgaggaaggtaggggagaatggaattcctggtgaagcggtggaatgcgtagatatcaggaggaacaccagtggcgaaggcggttctctggacctttcctgatgctgagaagcgaaagcgtggggagcaaacaggcttagataccctggtagtccacgccgtaaacggtgggtactaggtgtgggggacattccacgttctccgtgccgcagctaacgcattaagtaccccgcctggggagtacggccgcaaggctaaaactcaaaggaattgacggggccccgcacaagcggcggagcatgcggattaattcgatgcaacgcggagaaccttacctgggtttgacatatgccggaaacatctagagataggtgcccctttttggtcggtataccggtggtgcatggctgtcgtcagctcgtgtcgtgagatgttgggttaagtcccgcaacgagcgcaaccctcgtcctatgttgccagcgggtaatgccggggactcataggagaccgccggggtcaactcggaggaaggtggggatgacgtcaagtcatcatgccccttatgtccagggcttcacgcatgctacaatggccggtacaaagagctgcgaacctgtgagggtgagcgaatctcaaaaagccggtctcagttcggattggggtctgcaactcgaccccatgaagtcggagtcgctagtaatcgcagatcagcaacgctgcggtgaatacgttcccggggcttgtacacaccgcccgtcaagtcatgaaagtcggtaacacccgaagccggtggcctaaccccttgtgggagggagctgtcgaaggtgggaccggtaattaggactaagtcgtaacaaggt

SEQ ID NO: 1918 - DNA, 1562 bp, Tetragenococcus halophilus
tcaagatgagagtttgatcctggctcaggacgaacgctggcggcgtgcctaatacatgcaagtcgaacgctgcttaagaagaaacttcggttttttcttaagtggagtggcggacgggtgagtaacacgtggggaacctatccatcagcgggggataacacttggaaacaggtgctaataccgcatacggctttttttcacctgaaagaaagctcaaaggcgctttacagcgtcactgatggctggtcccgcggtgcattagccagttggtgaggtaacggctcaccaaagcaacgatgcatagccgacctgagagggtgatcggccacactgggactgagacacggcccagactcctacgggaggcagcagtagggaatcttcggcaatggacgcaagtctgaccgagcaacgccgcgtgagtgaagaaggttttcggatcgtaaagctctgttgtcagcaaagaacaggagaaagaggaaatgctttttccatgacggtagctgaccagaaagccacggctaactacgtgccagcagccgcggtaatacgtaggtggcaagcgttgtccggatttattgggcgtaaagcgagcgcaggcggtgatttaagtctgatgtgaaagcccccagctcaactggggagggtcattggaaactggatcacttgagtgcagaagaggagagtggaattccatgtgtagcggtgaaatgcgtagatatatggaggaacaccagtggcgaaggcggctctctggtctgtaactgacgctgaggctcgaaagcgtgggtagcaaacaggattagataccctggtagtccacgccgtaaacgatgagtgctaagtgttggagggtttccgcccttcagtgctgcagttaacgcattaagcactccgcctggggagtacgaccgcaaggttgaaactcaaaggaattgacgggggcccgcacaagcggtggagcatgtggtttaattcgaagcaacgcgaagaaccttaccaggtcttgacatcctttgaccgccctagagatagggtttccccttcgggggcaaagtgacaggtggtgcatggttgtcgtcagctcgtgtcgtgagatgttgggttaagtcccgtaacgagcgcaacccttattgttagttgccagcattgagttgggcactctagcaagactgccggtgacaaaccggaggaaggcggggatgacgtcaaatcatcatgccccttatgacctgggctacacacgtgctacaatgggaagtacaacgagcaagccaagccgcaaggcctagcgaatctctgaaagcttctctcagttcggattgcaggctgcaactcgcctgcatgaagccggaatcgctagtaatcgcggatcagcatgccgcggtgaatccgttcccgggccttgtacacaccgcccgtcacaccacgagagtttgtaacacccaaagtcggtgcggcaacccttaggggagccagccgcctaaggtgggacgaatgattggggtgaagtcgtaacaaggtagccgtatcggaaggtgcggctggatcacctcctttct

SEQ ID NO: 1919 - DNA, 1492 bp, Tetragenococcus koreensis
ctcaggacgaacgctggcggcgtgcctaatacatgcaagtcgaacgctgcttcgatcgaaacttcggtttcttttgaagcggagtggcggacgggtgagtaacacgtggggaacctatccatcagcgggggataacacttggaaacaggtgctaataccgcataaggctttctttcgcctgaaagaaagctaaaaggcgctttttgcgtcactgatggctggtcccgcggtgcattagccagttggtgaggtaacggctcaccaaagcaacgatgcatagccgacctgagagggtgatcggccacactgggactgagacacggcccagactcctacgggaggcagcagtagggaatcttcggcaatggacgaaagtctgaccgagcaacgccgcgtgagtgaagaaggttttcggatcgtaaagctctgttgtcagtaaagaacaggaaaaagaggcaatgctttttctatgacggtagctgaccagaaagccacggctaactacgtgccagcagccgcggtaatacgtaggtggcaagcgttgtccggatttattgggcgtaaagcgagcgcaggcggtgatttaagtctgatgtgaaagcccccggctcaaccggggagggtcattggaaactggatcacttgagtgcagaagaggagagtggaattccatgtgtagcggtgaaatgcgtagatatatggaggaacaccagtggcgaaggcggctctctggtctgtaactgacgctgaggctcgaaagcgtgggtagcaaacaggattagataccctggtagtccacgccgtaaacgatgagtgctaagtgttggagggtttccgcccttcagtgctgcagttaacgcattaagcactccgcctggggagtacgaccgcaaggttgaaactcaaaggaattgacgggggcccgcacaagcggtggagcatgtggtttaattcgaagcaacgcgaagaaccttaccaggtcttgacatcctttgaccacgcgagagatcgcgtttccccttcgggggcaaagtgacaggtggtgcatggttgtcgtcagctcgtgtcgtgagatgttgggttaagtcccgcaacgagcgcaacccttattgttagttgccagcattcagttgggcactctagcaagactgccggtgacaaaccggaggaaggtggggatgacgtcaaatcatcatgccccttatgacctgggctacacacgtgctacaatgggaagtacaacgagcaagccaagccgcaaggccgcgcgaatctctgaaagcttctctcagttcggattgcaggctgcaactcgcctgcatgaagccggaatcgctagtaatcgcggatcagcatgccgcggtgaatccgttcccgggccttgtacacaccgcccgtcacaccacgagagtttgtaacacccaaagtccggtgcggcaacctcattagaggagccagccgcctaaggtgggatgaatgattggggtgaagt

SEQ ID NO: 1920 - DNA, 1454 bp, Thermoanaerobacter pseudethanolicus
agttgagtgccggatagcggcggacgggtgagtaacgcgtgggcaacctacccttaagaccgggataacacctcgaaaggggtgctaatactggataagctccttgtagggcatcctatgaggagggaaggtagcgggagctaccgcttaaggatgggcccgcgtcccatcagctagttggtagggtaacggcctaccaaggcgacgacgggtagccggcctgagagggtggtcggccacactgggactgagacacggcccagactcctacgggaggcagcagtggggaatcttgcgcaatgggcgaaagcctgacgcagcgacgccgcgtgagcgaggaaggccttcgggtcgtaaagctcgatagtgtgggaagaagggatgacggtaccacacgaaagccccggctaactacgtgccagcagccgcggtaagacgtagggggcgagcgttgtccggaattactgggcgtaaagggcgcgtaggcggccgttcaagtcaggtgtaaaatacccgggctcaacccggggatagcacttgaaactgggcggctagagggcaggagaggggagtggaattcccggtgtagcggtgaaatgcgtagatatcgggaggaataccagtggcgaaggcgactctctggactgaccctgacgctgaggcgcgaaagcgtggggagcaaacaggattagataccctggtagtccacgccgtaaacgatgggtactaggtgtgggatgcggaagcattccgtgccgtagttaacgcaataagtaccccgcctggggagtacggccgcaaggttgaaactcaaaggaattgacgggggcccgcacaagcggtggagcatgtggtttaattcgaagcaacgcgaagaaccttaccagggcttgacatgcaggtagtagcgagccgaaaggtgagcgaccttaccttaaaggtgaggagcctgcacaggtggtgcatggttgtcgtcagctcgtgtcgtgagatgttgggttaagtcccgcaacgagcgcaacccctgcctctagttgccagcgggtgaagccgggcactctagagggactgccgtggacaacacggaggaaggtggggatgacgtcaaatcatcatgccctatatgccctgggccacacacgtgctacaatggccggtacagagggaagcgaagccgcgaggtggagcgaaacccaaaaagccggtccaagttcggattgcaggctgcaactcgcctgcatgaagtcggaatcgctagtaatcgcggatcagcatgccgcggtgaatacgttcccgggccttgtacacaccgcccgtcacaccacgagagtctgcaacacccgaagccggtgacccaaccgggaaggagggagccgtcgaaggtggggcagatgattggggtgaagtcgtaacaaggtagccgtatcggaaggtgcggctggatcacctccttt

SEQ ID NO: 1921 - DNA, 1542 bp, Thermobifida fusca
ggagagtttgatcctggctcaggacgaacgctggcggcgtgcttaacacatgcaagtcgagcggtaaggccccttcgggggtacacgagcggcgaacgggtgagtaacacgtgagtaacctgcccctgactctgggataagcctgggaaactgggtctaataccggatatgacctcgtgccgcatggtgtggggtggaaaggtgtttttccggtcagggatgggctcgcggcctatcagcttgttggtggggtaacggcctaccaaggcgatgacgggtagccggcctgagagggcgaccggccacactgggactgagacacggcccagactcctgcgggaggcagcagtggggaatattgcgcaatgggcggaagcctgacgcagcgacgccgcgtgggggatgaaggccttcgggttgtaaacctcttttaccactcacgaaggcccctggttttctgggggttgacggtaggtggtgaataaggaccggctaactacgtgccagcagccgcggtaatacgtagggtccgagcgttgtccggaattattgggcgtaaagagctcgtaggcggcctgtcgcgtctgctgtgaaagtccggggcttaactccgggtgtgcagtggatacgggcaggcttgaggtaggtaggggagactggaattcctggtgtagcggtgaaatgcgcagatatcaggaggaacaccggtggcgaaggcgggtctctgggccttacctgacgctgaggagcgaaagcgtggggagcgaacaggattagataccctggtagtccacgccgtaaacgttgggcgctaggtgtggggactttccacggtttccgtgccgtagctaacgcattaagcgccccgcctggggagtacggccgcaaggctaaaactcaaaggaattgacgggggcccgcacaagcggcggagcatgttgcttaattcgacgcaacgcgaagaaccttaccaaggcttgacatcaccggtaatcctccagagatggggggtccttcggggatcggtgacaggtggtgcatggctgtcgtcagctcgtgtcgtgagatgttgggttaagtcccgcaacgagcgcaacccctgtcccatgttgccagcacgtggtggtggggactcatgggagactgccggggtcaactcggaggaaggtggggatgacgtcaagtcatcatgccccttatgccttgggctgcaaacatgctacaatggccggtacagagggcgtgcgatgtcgtgaggcggagcgaatctcttaaagccggtctcagttcggattggggtctgcaactcgaccccatgaaggtggagtcgctagtaatcgcggatcagcaacgccgcggtgaatacgttcccgggccttgtacacaccgcccgtcacgtcacgaaagtcggcaacacccgaaacacgtggcctaaccctttgtgggggggagcgtgtgaaggtggggctggcgattgggacgaagtcgtaacaaggtagccgtaccggaaggtgcggctggatcacctcctttctaaggagc

SEQ ID NO: 1922 - DNA, 1503 bp, Thermofilum pendens
actccggttgatcctgccggacccgaccgctatcggggtggggctaacccatggaagtctaggagccggggctacggccggctccggcggacggctcagtagcacgtggctaacctaccctcgggagggggataaccccgggaaactggggataaacccccataggcgcggacacctggaatgggtccgcgctgaaagggccacggtaccatgcttaccgtggccgcccgaggatggggctgcgccctatcaggtagttggcggggtaacggcccgccaagccgataacgggtgggggccgtgagagcgggagccccgagatgggcactgagacaagggcccaggccctacggggtgcaccaggggcgaaacttccgcaatgcgggaaaccgtgacggagtcaccccgagtgccacccgaagagggtggcttttgcccggtctaaaaagccgggcgaataagcggggggcaagcttggtgtcagccgccgcggtaataccaaccccgcgagtggtcgggacgtttattgggcctaaagcgtccgtagccggcccggtaagtccctccttaaagcccacggctcaaccgtgggagcggagggatactgccgggctagggggcgggagaggccgggggtactcctggggtaggggcgaaatcctataatcccaggaggaccaccagtggcgaaggcgcccggctagcacgcgcccgacggtgagggacgaaagctgggggagcaaaggggattagatacccccgtagtcccagctgtaaacgatgcgggctaggtgttggacgggcttcgagcccgtccagtgccgtagggaagccgttaagcccgccgcctggggagtacggccgcaaggctgaaacttaaaggaattggcgggggagcaccacaaggggtgaagcttgcggtttaattggagtcaacgccggaaaccttaccgggggcgacagcaggatgaaggccaggctgacgaccttgccagacgagctgagaggaggtgcatggccgtcgccggctcgtgccgtgaggtgtcctgttaagtcagggaacgagcgagacccccgcccctagttgctacccagcccttcggggctggggcactctagggggactgccggcgataagccggaggaaggtgggggctacggcaggtcagtatgccccgaaacccccgggctacacgcgagctgcaatggcggggacagcgggttccgaccccgaaagggggaggtaatcccttaaaccccgcctcagtaggaatcgagggctgcaactcgccctcgtgaacgtggaatccctagtaaccgcgtgtcaccaacgcgcggtgaatacgtccctgctccttgcacacaccgcccgtcgctccacccgagggaggcctaggtgaggcctcctgccgacgaggtgggaggtcgaacctgggcctcccaaggggggagaagtcgtaacaaggtggccgtaggggaacctgcggccggatcacctccttt

SEQ ID NO: 1923 - DNA, 1470 bp, Thermus aquaticus
gctcagggtgaacgctggcggcgtgcctaagacatgcaagtcgtgcgggccgtggggtatctcacggtcagcggcggacgggtgagtaacgcgtgggtgacctacccggaagagggggacaacatggggaaacccaggctaatcccccatgtggacacatcctgtggggtgtgtttaaagggttttgcccgcttccggatgggcccgcgtcccatcagctagttggtggggtaagagcccaccaaggcgacgacgggtagccggtctgagaggacggccggccacaggggcactgagacacgggccccactcctacgggaggcagcagttaggaatcttccgcaatgggcgcaagcctgacggagcgacgccgcttggaggaggaagcccttcggggtgtaaactcctgaacccgggacgaaacccccgatgaggggactgacggtaccggggtaatagcgccggccaactccgtgccagcagccgcggtaatacggagggcgcgagcgttacccggatttactgggcgtaaagggcgtgtaggcggcttggggcgtcccatgtgaaaggccacggctcaaccgtggaggagcgtgggatacgctcaggctagacggtgggagagggtggtggaattcccggagtagcggtgaaatgcgcagataccgggaggaacgccgatggcgaaggcagccacctggtccactcgtgacgctgaggcgcgaaagcgtggggagcaaaccggattagatacccgggtagtccacgccctaaacgatgcgcgctaggtctctgggttatctgggggccgaagctaacgcgttaagcgcgccgcctggggagtacggccgcaaggctgaaactcaaaggaattgacgggggcccgcacaagcggtggagcatgtggtttaattcgaagcaacgcgaagaaccttaccaggccttgacatgctagggaacctgggtgaaagcctggggtgccccgcgaggggagccctagcacaggtgctgcatggccgtcgtcagctcgtgtcgtgagatgttgggttaagtcccgcaacgagcgcaacccctgccgttagttgccagcgggtgaagccgggcactctaacgggactgcctgcgaaagcaggaggaaggcggggacgacgtctggtcatcatggcccttacggcctgggcgacacacgtgctacaatgcccactacagagcgaggcgacctggcaacagggagcgaatcgcaaaaaggtgggcgtagttcggattggggtctgcaacccgaccccatgaagccggaatcgctagtaatcgcggatcagccatgccgcggtgaatacgttcccgggccttgtacacaccgcccgtcacgccatgggagcgggttctacccgaagtcgccgggagccttagggcaggcgccgagggtagggcccgtgactggggcgaagtcgtaacaaggtagctgtaccg

SEQ ID NO: 1924 - DNA, 1400 bp, Tissierella praeacuta
ggctcaggacgaacgctggcggcgtgcctaacacatgcaagtcgagcgaagtttttaaagaagatttcttcggaatgaaactttaattatcttagcggcggacgggtgagtaacgcgtgagaaacctgccttttacaaagggatagcctcgggaaactgggattaataccttatgacactgtcgcatgagatttaagtcaaagcgtaaagcggtaaaagatggtctcgcgtcccattagttagttggtgaggtaaaggctcaccaagacagcgatgggtagccggcctgagagggtgaacggccacactggaactgagacacggtccagactcctacgggaggcagcagtggggaatattgcacaatggaggaaactctgatgcagcgacgccgcgtgaacgatgaaggctttcgggtcgtaaagttctgtcctaagggacgataatgacggtaccttaggaggaagccccggctaactacgtgccagcagccgcggtaatacgtagggggcaagcgttgtccggatttattgggcgtaaagggtgcgtaggcggccttttaagtcagatgtgaaagatcacggctcaaccgtggtaagcatttgaaactgaaaggcttgagttaaggagaggaaagtggaattcctagtgtagcggtgaaatgcgtagatattaggaggaataccagtggcgaaggcgactttctggacttatactgacgctgaggcacgaaagcgtggggagcgaacaggattagataccctggtagtccacgccgtaaacgatgagtgctaggtgttgggggtcaaacctcggtgccgcagctaacgcattaagcactccgcctggggagtacgtacgcaagtatgaaactcaaaggaattgacggggacccgcacaagcagcggagcatgtggtttaattcgaagcaacgcgaagaaccttaccagggcttgacatgcccctgaccgtcctagagatagggctttaccttcgggtacaggggacacaggtggtgcatggttgtcgtcagctcgtgtcgtgagatgttgggttaagtcccgcaacgagcgcaacccttgcctttagttgctaacagataagctgagcactctagagggactgccgatgacaaatcggaggaaggtggggatgacgtcaaatcatcatgccctttatgtcctgggctacacacgtgctacaatggtcggtacaacgagcagctacttagcgataagatgctaatctcttaaagccgatcccagttcggattgcaggctgcaactcgcctgcatgaagtcggagttgctagtaatcgcggatcagaatgtcgcggtgaatgcgttcccgggtcttgtacacaccgcccgtcacaccatgggagttggcaatacccgaag

SEQ ID NO: 1925 - DNA, 1441 bp, Trabulsiella guamensis
acgctggcgcagccttacacatgcaagtcgagcggcagcgggggaaagctgctttcccgccggcgagcggcggacgggtgagtaatgtctgggaaactgcctgatggagggggataactactggaaacggtagctaataccgcataacgtcttcggaccaaagtgggggaccttcgggcctcatgccatcagatgtgcccagatgggattagctagtaggtggggtaacggctcacctaggcgacgatccctagctggtctgagaggatgaccagccacactggaactgagacacggtccagactcctacgggaggcagcagtggggaatattgcacaatgggcgcaagcctgatgcagccatgccgcgtgtatgaagaaggccttcgggttgtaaagtactttcagcggggaggaaggtgttgtggttaataaccagagcaattgacgttacccgcagaagaagcaccggctaactccgtgccagcagccgcggtaatacggagggtgcaagcgttaatcggaattactgggcgtaaagcgcacgcaggcggtctgtcaagtcggatgtgaaatccccgggctcaacctgggaactgcatccgaaactggcaggcttgagtcttgtagaggggggtagaattccaggtgtagcggtgaaatgcgtagagatctggaggaataccggtggcgaaggcggccccctggacaaagactgacgctcaggtgcgaaagcgtggggagcaaacaggattagataccctggtagtccacgccgtaaacgatgtcgacttggaggttgtgcccttgaggcgtggcttccggagctaacgcgttaagtcgaccgcctggggagtacggccgcaaggttaaaactcaaatgaattgacgggggcccgcacaagcggtggagcatgtgttttaatttcgatgcaacgcgaagaaccttacctggtcttgacacccacagaaccctgtagagatacgggggtgccttcgggaactgtgagacaggtgctgcatggctgtcgtcagctcgtgttgtgaaatgttgggttaagtcccgcaacgagcgcaacccttatcctttgttgccagcggtccggccgggaactcaaaggagactgccagtgataaactggaggaaggtggggatgacgtcaagtcatcatggcccttacgaccagggctacacacgtgctacaatgcatatacaagagaagcgacctcgcgagagcaagcggcctcataaagtatgtcgtagtccggattggagtctgcaactcgactccatgaagtcggaatcgctagtaatcgtggatcagaatgccacggtgaatacgttcccgggccttgtacacaccgcccgtcacaccatgggagtgggttgcaaaagaagtaggtagcttaaccttcgggagggcgcttaccacttgtgatta

SEQ ID NO: 1926 - DNA, 1543 bp, Treponema denticola
tggagagtttgatcctggctcagaacgaacgctggcggcgcgtcttaagcatgcaagtcgaacggtaagggagagcttgctctcccctagagtggcggactggtgagtaacgcgtgggtgacctgccctgaagatggggatagctagtagaaatattagataataccgaatgtgctcatttacataaaggtaaatgaggaaaggagctacggctccgcttcaggatgggcccgcgtcccattagctggttggtgaggtaaaggctcaccaaggcaacgatgggtatccggcctgagagggtgaacggacacattgggactgagatacggcccaaactcctacgggaggcagcagctaagaatcttccgcaatggacgaaagtctgacggagcgacgccgtgtgaatgaagaaggccgaaaggttgtaaaattcttttgcagatgaagaataagaagaagagggaatgcttctttgatgacggtagtcatgcgaataagccccggctaattacgtgccagcagccgcggtaacacgtaaggggcgagcgttgttcggaattattgggcgtaaagggtatgtaggcggttaggtaagcctggtgtgaaatctacgagctcaactcgtaaactgcattgggtactgcttgacttgaatcacggaggggaaaccggaattccaagtgtaggggtggaatctgtagatatttggaagaacaccggtggcgaaggcgggtttctggccgatgattgacgctgatatacgaaggtgcggggagcaaacaggattagataccctggtagtccgcacagtaaacgatgtacactaggtgtcggggcaagagcttcggtgccgacgcaaacgcattaagtgtaccgcctgggaagtatgcccgcaagggtgaaactcaaaggaattgacgggggcccacacaagcggtggagcatgtggtttaattcgatgatacgcgagaaaccttacctgggtttgacatcaagagcaatgacatagagatatggcagcgtagcaatacggctcttgacaggtgctgcatggctgtcgtcagctcgtgccgtgaggtgttgggttaagtcccgcaacgagcgcaacccctactgccagttactaacaggtaaagctgaggactctggcggaactgccgatgacaaatcggaggaaggtggggatgacgtcaagtcatcatggcccttacgtccagggctacacacgtgctacaatggttgctacaaatcgaagcgacaccgcgaggtcaagcaaaacgcaaaaaagcaatcgtagtccggattgaagtctgaaactcgacttcatgaagttggaatcgctagtaatcgcacatcagcacggtgcggtgaatacgttcctgggccttgtacacaccgcccgtcacaccatccgagtcgagggtacccgaagtcgctagtctaacccgtaagggaggacggtgccgaaggtacgtttggtaaggagggtgaagtcgtaacaaggtagccgtaccggaaggtgcggctggatcacctcctttct

SEQ ID NO: 1927 - DNA, 1297 bp, Treponema sp.
  P1
aacgaacgctggcggcgcgtcttaagcatgcaagtcgaacgagtggcggactggtgaggaacacgtgggtaatctacccttaagatggggatagctgttagaaatagcaggtaataccgaatacagaaagtcgcttgaggatgagcttgcgtcccattagctagttggtgaggtaacggcccaccaaggcgacgatgggtatccggcctgagagggtgaacggacacattgggactgagatacggcccaaactcctacgggaggcagcagctaagaatattccgcaatggacggaagtctgacggagcgacgccgcgtggatgaagaaggctgaaaagttgtaaaatccttttgttgatgaagatgacggtagtcggtgaataagccccggctaattacgtgccagcagccgcggtaacacgtaaggggcgagcgttgttcggaattattgggcgtaaagggcatgtaggcggttatgtaagcctgatgtgaaatcctggggcttaaccccagaatagcattgggtactgtgtaactcgaattacggaagggaaactggaattccaagtgtaggggtggaatctgtagatatttggaagaacaccggtggcgaaggcgggtttctggccgaattgacgctgagatgcgaaagtgtggggatcgaacaggattagataccctggtagtccacaccgtaaacgatgtacactaggtgttggggcttcagtgccaaagcaaacgcgataagtgtaccgcctggggagtatgcccgcaagggtgaaactcaaaggaattgacgggggcccgcacaagcggtggagcatgtggtttaattcgatggtacgcgaggaaccttacctgggtttgacatcgacaggtgctgcatggctgtcgtcagctcgtgccgtgaggtgttgggttaagtcccgcaacgagcgcaacccctactgccagttactaacagctgaggactctggcggaactgccgatgacaaatcggaggaaggtggggatgacgtcaagtcatcatggcccttatgtccagggctacacacgtgctacaatggttgccaaagcgacgcgagaccgtaaggtggagcaaaccgcaagcgatcgtagttcggatgaagtctgaaactcgacttcagaagttggaatcgctagtaatcgcgcatcagcacggcgcggtgaatacgttcccgggccttgtacacaccgcccgtcacaccatccgagttgggggtacccgaagtcgctgtctaggacggtgccgaaggtacgcttggtaaggagggtg

SEQ ID NO: 1928 - DNA, 1297 bp, Treponema sp.
  P4 oral clone MB2_G19
aacgaacgctggcggtgcgttttaagcatgcaagtcgaacgagtggcggactggtgagtaacgcgtgggtgatctacctttaagatggggatagcttttagaaataagagataataccgaatatggaaagccgcttgaagatgagcctgcgtcccattagctagttggtggggtaaaggcctaccaaggcaatgatgggtatccggcctgagagggtgaccggacacattgggactgagatacggcccaaactcctacgggaggcagcagctgagaatcttccgcaatggacgaaagtctgacggagcgacaccgcgtgaatgatgaaggccgaaaggttgtaaagttcttttgcagacaaagatgacggtagtttgcgaataagccccggctaattacgtgccagcagccgcggtaatacgtaaggggcgagcgttgttcggaattattgggcgtaaagggcatgtaggcggtttagtaagcctgatgtgaaatctacgagcttaactcgtaaactgcattgggtactgcttaactagagttatggaggggaaactggaattccaagtgtaggggtggaatctgtagatatttggaagaacaccggtggcgaaggcgggtttctagccaaactgacgctgatatgcgaaggtgcggggagcaaacaggattagataccctggtagtccgcacagtaaactatgtacactagatgttggggactcagtgttgaagcaaacgcaataagtgtaccgcctggggagtatgcccgcaagggtgaaactcaaaggaattgacgggggcccacacaagcggtggagcatgtggtttaattcgatgatacgcgaggaaccttacctgggtttgacatcgacaggtgctgcatggctgtcgtcagctcgtgccgtgaggtgttgggttaagtcccgcaacgagcgcaacccctactgccagttactaacagctgaggactctggcggaactgccggtgataaaccggaggaaggtgggggtgacgtcaagtcatcatggcccttatgtccagggctacacacgtgctacaatggttgtcaaagtgatgcgaagtcgcgagacggagcgaaacgcatgcaatcgtagtccggatggaatctgaaacctgattccagaagctggaatcgctagtaatcgcatatcagcacgatgcggtgaatacgttcctgggccttgtacacaccgcccgtcacaccatccgagtcgagggtacccgaagatgctgtctaggacggtggcgaaggtacgtttggtaaggagggtg

SEQ ID NO: 1929 - DNA, 1297 bp, Treponema sp.
  P5 oral clone MB3_P23
aacgaacgctggcggtgcgtcttaagcatgcaagtcgaacgagtggcggactggtgagtaacgcgtggatgatctacctttgagatggggatagcttctagaaataggaggtaataccgaataacaaaagccgctcgaagatgagtctgcgtcccattagctagttggtgaggtaaaggcccaccaaggcgacgatgggtacccggcctgagagggtgaacgggcacattgggactgagatacggcccaaactcctacgggaggcagcagctgagaatcttccgcaatggacgaaagtctgacggagcgacaccgcgtgaacgatgaaggccggaaggttgtaaagttcttttgcagacaaagatgacggtagtttgcgaataagccccggctaattacgtgccagcagccgcggtaatacgtaaggggcgagcgttgttcggaattattgggcgtaaagggcatgtaggcggttaggtaagcctgatgtgaaatgtatgagcttaactcataaactgcattgggtactgcttgacttgaatcatggaggggaaactggaattccaagtgtaggggtggaatctgtagatatttggaagaacaccggtggcgaaggcgggtttctagccaaattgacgctaaggtgcgagggtgcggggagcaaacaggattagataccctggtagtccgcacagtaaacgatgtacactaggtgttggggactcagtgccggagcaaacgcaataagtgtaccgcctggggagtatgcccgcaagggtgaaactcaaaggaattgacgggggcccacacaagcggtggagcatgtggtttaattcgatgatacgcgaggaaccttacctgggtttgacatcgacaggtgctgcatggctgtcgtcagctcgtgccgtgaggtgttgggttaagtcccgcaacgagcgcaacccctactgccagttactaacagctgaggactcaggcggaactgccggtgatataccggaggaaggtggggatgacgtcaagtcatcatggcccttatgtccagggctacacacgtgctacaatggttgtcaaagtgaggcgaagccgcgaggttaagcgaatcgcaagcaatcgtagtccggatggaatctgaaacctgattccagaagctggaatcgctagtaatcgcatatcagcacgatgcggtgaatacgttcctgggccttgtacacaccgcccgtcacaccatccgagtcgaaggtacccgaagatgctgtctaggacggtggcgaaggtacgtttggtaaggagggtg

SEQ ID NO: 1930 - DNA, 1297 bp, Treponema sp.
  P6 oral clone MB4_G11
aacgaacgctggcggtgcgttttaagcttgcaagtcgaacgagtggcggactggtgagtaacgcgtaggtgatctacctttaagactgggacagcctttagaaataaggggtaataccggatgtgggaagccgcttagagatgagcctgcgtcccattagctagttggtaaggtaacggcctaccaaggcgatgatgggtatccgacctgagagggtgatcggacacattgggactgagatacggcccaaactcctacgggaggcagcagctgagaatcttccgcaatggacgaaagtcggacggagcgacaccgcgtgaatgatgaaggccgaagggttgtaaagttcttttgcagacaaagatgacggtagtttgcgaataagccccggctaattacgtgccagcagccgcggtaatacgtaaggggcgagcgttgctcggaattattgggcgtaaagggcatgtaggcggttgggtaagcctgatgtgaaatctacgagcttaactcgtaaactgcattgggtactgctcatcttgaatcatagagggggaactggaattccaagtgtaggggtggaatctgtagatatttggaagaacaccggtggcgaaggcgggttcctagctaaattgacgctgatgtgcgaaggtgcggggagcaaacaggattagataccctggtagtccgctcagtaaacgatgtacactaggtgttggggactcagtgccggcgcaaacgcaataagtgtaccgcctggggagtatgcccgcaagggtgaaactcaaaggaattgacgggggcccacacaagcggtggagcatgtggtttaattcgatgatacgcgaggaaccttacctgggtttgacatcgacaggtgcagcatggctgtcgtcagctcgtgccgtgaggtgttgggttaagtcccgcaacgagcgcaacccctactgccagttactaacagctgaggactctggcggaactgccggtgataaaccggaggaaggtggggatgacgtcaagtcatcatggcccttatgtccagggctacacacgtgctacaatggttgtcaaagtgatgcgaagtcgcgagacggagcgaaacgcatgcaatcgtagtccggatggaatctgaaacctgattccagaagctggaatcgctagtaatcgcatatcagcacgatgcggtgaatacgttcctgggtcttgtacacaccgcccgtcacaccatccgagtcgagggtacccgaagatgctgtctaggacggtggcgaaggtacgtttggtaaggagggtg

SEQ ID NO: 1931 - DNA, 1479 bp, Treponema lecithinolyticum
  modified_base (897)..(897): a, c, t, g, unknown or other
  modified_base (1440)..(1440): a, c, t, g, unknown or other
  modified_base (1449)..(1449): a, c, t, g, unknown or other
  modified_base (1458)..(1458): a, c, t, g, unknown or other
aacgaacgctggcggcgcgtcttaaacatgcaagtcgaacggtaaggaaggagcttgctcctttctgagagtggcggactggtgagtaacacgtgggtgacataccttttagatggggatagctattagaaatagtaggtaataccgaatgtgaccgtatctgttagagggatacgaggaaaggagctaaggcttcgctaaaagaatggcccgcggcccattatgctcgttggtgaggtaacggcccaccaaggcgatgatgggtatccggcctgagagggtggacggacacattgggactgagatacggcccagacttctacgggaggcagcagttaagaatattccgcaatggacgaaagtctgacggagcgacgccgcgtggatgaagaatgccgaaaggttgtaaaatccttttaagcctgaggaataagcacagtagggaatgattgtgtggtgactgtagggcttgaataagcaccggcaaattacgtgccagcagccgcggtaacacgtaaggtgcgagcgttgttcggaattattgggcgtaaagggcatgtaggcggatgagcaagcttggtgtgaaatgctacagcttaactgtgggacagcattgagaactgcacatcttgaattactgaagggtaactagaattccacgtgtaggggtgaaatctgtagatatgtggaagaataccaatggcgaaggcaagttaccggcagataattgacgctgaggtgcgaaagtgcggggagcgaacaggattagataccctggtagtccgcacagtaaacgatgtacactaggtgtctggcaacaaagctgggtgccaaagcaaacgtggtaagtgtaccgcctggggagtatgcccgcaagggtgaaactcaaaggaattnacgggggcccgcacaagcggtggagcatgtggtttaattcgatggtacgcgaggaaccttacctgggtttgacatagtacttaagttcgtagagatacggatgcgtagcaatacgaagtacaacaggtgctgcatggctgtcgtcagctcgtgccgtgaggtgttgggttaagtcccgcaacgagcgcaacccctactgccagttactaacaggtaatgcttgaggactctggcggaactgccggtgacaaaccggaggaaggtggggatgacgtcaagtcatcatggcccttatgtccagggctacacacgtgctacaatggtagcgacagagtgaagcgaagccgcgaggtggagcaaaacgcagaaaagctatcgtagttcggattggagtctgaaactcgactccatgaagttggaatcgctagtaatcgcatatcagcacgatgcggtgaatacgttcccgggccttgtacacaccgcccgtcacaccatccgagtagagggtacccgaagtcggtagtctaaccgcaaggaggacgntgccgaagntatgctttntaaggagggtgaagtcgtaac

SEQ ID NO: 1932 - DNA, 1548 bp, Treponema pallidum
atggagagtttgatcctggctcagaacgaacgctggcggtgcgttttaagcatgcaagtcgaacggcaaggaagcgaattttcgtttctctagagtggcggactggtgagtaacgcgtgggtaatctgcctttgagatggggatagcctctagaaatagggggtaataccgaatacgctcttttggacgtaggtctttgagaggaaaggggctgcggcctcgctcagagatgagcctgcgacccattagcttgttggtggggtaatggcctaccaaggcgtcgatgggtatccgacctgagagggtgaccggacacactgggactgagatacggcccagactcctacgggaggcagcagctaagaatattccgcaatgggcgaaagcctgacggagcgacaccgcgtggatgaggaaggtcgaaagattgtaaagttcttttgccgacgaagaatgaggacgggagggaatgcccgtttgatgacggtagtcgtgcgaataagccccggctaattacgtgccagcagccgcggtaacacgtaaggggcgagcgttgttcggaattattgggcgtaaagggcatgcaggcggactggtaagcctggtgtgaaatccccgagctcaacttgggaactgcactgggtactgctggtctagaatcacggaggggaaaccggaattccaagtgtaggggtggaatctgtagatatttggaagaacaccggtggcgaaggcgggtttctggccgatgattgacgctgaggtgcgaaggtgtggggagcgaacaggattagataccctggtagtccacacagtaaacgatgtacactaggtgttggggcatgagtctcggcgccgacgcgaacgcattaagtgtaccgcctggggagtatgctcgcaagagtgaaactcaaaggaattgacgggggcccgcacaagcggtggagcatgtggtttaattcgatgatacgcgaggaaccttacccgggtttgacatcaagaggagcgccgtagaaatgcggtggcgtagcgatacgcctcttgacaggtgctgcatggctgtcgtcagctcgtgccgtgaggtgttgggttaagtcccgcaacgagcgcaacccctactgccagttgccagcaagtggtgttggggactctggcggaactgccggtgacaaaccggaggaaggtggggatgacgtcaagtcatcatggcccttatgtccggggctacacacgtgctacaatggttgctacagagcgatgcgaggttgtgaagtggagcaaaccgcaaaaaggcaatcgtagtccggattgaagtctgaaactcgacttcatgaagttggaatcgctagtaatcgcacatcagcatggtgcggtgaatgtgttcccgggccttgtacacaccgcccgtcacaccatccgagttggagatacccgaagtcactagcctaacccgcaagggagggcggtgccgaaggtatgtttggtaaggagggtgaagtcgtaacaaggtagccgtaccggaaggtgcggctggatcacctcctttct

SEQ ID NO: 1933 - DNA, 1485 bp, Treponema parvum
gctcagaacgaacgctggcggcgcgtcttaagcatgcaagtcgaacggcaagaggaaagcttgcttttctcctagagtggcggactggtgagtaacacgtgggtgacgaaccctcctgacagggatagctggtagaaatatcagataataccggatacgaactctatagttagagtatagagaggaaaggtgctttggcaccgcagggggatcggctcgcggcctatcagctagttggcagggtaaaggcctgccaaggcgacgacgggtatccggcctgagagggtggacggacacattgggactgagatacggcccagactcctacgggaggcagcagctaagaatattccgcaatgggcgaaagcctgacggagcgacgccgcgtggacgatgaaggccgaaaggttgtaaagtccttttgaacctgaagaataagtttaagagggaatgcttaagcggtgacagaaaggtttgaataagcaacggctaattacgtgccagcagccgcggtaacacgtaagttgcgagcgttgttcggaattattgggcgtaaagggcatctaggcggtcattcaagcttggtgtgaaataccggggcttaactccggggctgcattgagaactggatgactggagtcactgaagggcaaccagaattccaggtgtaggggtgaaatctgtagatatctggaagaataccaatggcgaaggcaggttaccggcagatgactgacgctgaagtgcgaaggtgcggggagcaaacaggattagataccctggtagtccgcacagtcaacaatgtacactcggtgtccggccaagaggctgggtgccaaagcaaacgcgataagtgtaccgcctggggagtatgcccgcaagggtgaaactcaaaggaattgacgggggcccgcacaagcggtggagcatgtggtttaattcgatggtacgcgaggaaccttacctgggtttgacatacacagcgatcatatagagatatgtgagcgtagcaatacggctgtgaacaggtgctgcatggctgtcgtcagctcgtgccgtgaggtgttgggttaagtcccgcaacgagcgcaacccctactgccagttaccagcatgtaaagatggggactctggcggaactgccggtgacaaaccggaggaaggtggggatgacgtcaagtcatcatggcccttatgtccagggcaacacacgtgctacaatggtcgcgacagagtgaagcgaagtcgagaggcgaagcaaaacgcataaaagcgatcgtagtccggattggagtctgaaacccgactccatgaagttggaatcgctagtaatcgcacatcagcacggtgcggtgaatacgttcccgggccttgtacacaccgcccgtcacaccatccgagtaaaggatacccgaagccagtggttcaaccgcaaggagggcgctgtcgaaggtatgctttgtaaggggggtgaagtcgtaacaa

SEQ ID NO: 1934 - DNA, 1547 bp, Treponema phagedenis
tggagagtttgatcctggctcagaacgaacgctggcggcgcgtcttaagcatgcaagtcgaacggcaagggaggagcttgcttctcccctagagtggcggactggtgagtaacgcgtgggtgatctacccttaagatggggatagctcctagaaataggaggtaataccgaatacgcttatacggataaagccgtataaggaaaggaggctgcggccttgcttgaggatgagcccgcgtcccattatgcttgttggtgaggtaacggcttaccaaggcgacgatgggtatccggcctgagagggtggacggacacattgggactgagatacggcccaaactcctacgggaggcagcagctaagaatattccgcaatggacggaagtctgacggagcgacgccgcgtggacgaagaaggccgaaaggttgtaaagttcttttgccgatgaagaataagaggatgagggaatgcgtccttgatgacggtagtcgagcgaataagccccggctaattacgtgccagcagccgcggtaacacgtaaggggcgagcgttgttcggaattattgggcgtaaagggcacgcaggcgggttggtaagcctgatgtgaaatactcaagcttaacttgagaattgcattgggtactgccagtcttgaatcacggaggggaaaccggaattccaagtgtaggggtggaatctgtagatatttggaagaacaccggtggcgaaggcgggtttctggccgatgattgacgctgaggtgcgaaggtgtggggagcaaacaggattagataccctggtagtccacacagtaaacgatgtacactaggtgttggggcaagagcttcagtgccggcgcaaacgcaataagtgtaccgcctggggagtatgcccgcaagggtgaaactcaaaggaattgacgggggcccgcacaagcggtggagcatgtggtttaattcgatgatacgcgaggaatcttacctgggtttgacatcaaaagcaatattatagagatatggtagcgtagcaatacggcttttgacaggtgctgcatggctgtcgtcagctcgtgccgtgaggtgttgggttaagtcccgcaacgagcgcaacccctactgtcagttgctaacaggtaaagctgaggactctggcggaactgccgatgacaaatcggaggaaggtggggatgacgtcaagtcatcatggcccttatgtccagggctacacacgtgctacaatggttgctacaaagtgaagcgagactgtgaggttaagcaaatcgcaaaaaagcaatcgtagttcggattgaagtctgaaactcgacttcatgaagttggaatcgctagtaatcgcacatcagcacggtgcggtgaatacgttcccgggccttgtacacaccgcccgtcacaccatccgagttgagggtacccgaagtcgccagtctaacccgtaagggagggcggtgccgaaggtatgtttggcaaggagggtgaagtcgtaacaaggtagccgtaccggaaggtgcggctggatcacctcctttct

SEQ ID NO: 1935 - DNA, 1260 bp, Treponema putidum
agtggcggactggtgagtaacgcgtgggtgacctgccctgaagatggggatagctagtagaaatattagataataccgaatgtggaaagccgctttaggatgggcctgcgtcccattagctagttggtgaggtaaaggctcaccaaggcaacgatgggtatccggcctgagagggtgaacggacacattgggactgagatacggcccaaactcctacgggaggcagcagctaagaatcttccgcaatggacgaaagtctgacggagcgacgccgtgtgaatgaagaaggccgaaaggttgtaaaattcttttgcagatgaagatgacggtagtctgcgaataagccccggctaattacgtgccagcagccgcggtaacacgtaaggggcgagcgttgttcggaattattgggcgtaaagggtatgtaggcggttaggtaagcctggtgtgaaatctacgagctcaactcgtaaactgcattgggtactgcttaacttgaatcacggaggggaaaccggaattccaagtgtaggggtggaatctgtagatatttggaagaacaccggtggcgaaggcgggtttctggccgaattgacgctgatatacgaaggtgcggggagcaaacaggattagataccctggtagtccgcacagtaaacgatgtacactaggtgtcggggcttcggtgccgacgcaaacgcattaagtgtaccgcctgggaagtatgcccgcaagggtgaaactcaaaggaattgacgggggcccacacaagcggtggagcatgtggtttaattcgatgatacgcgaggaaccttacctgggtttgacatcgacaggtgctgcatggctgtcgtcagctcgtgccgtgaggtgttgggttaagtcccgcaacgagcgcaacccctactgccagttactaacagctgaggactctggcggaactgccgatgacaaatcggaggaaggtggggatgacgtcaagtcatcatggcccttacgtccagggctacacacgtgctacaatggttgccaaatcgaagcgacaccgcgaggtcaagcaaaacgcaagcaatcgtagtccggatgaagtctgaaactcgacttcagaagttggaatcgctagtaatcgcacatcagcacggtgcggtgaatacgttcctgggccttgtacacaccgcccgtcacaccatccgagtcgagggtacccgaagtcgctgtctaggacggtgccgaaggtacgtttggtaaggagggtgaagt

SEQ ID NO: 1936 - DNA, 1455 bp, Treponema refringens
  modified_base (1447)..(1447): a, c, t, g, unknown or other
  modified_base (1454)..(1454): a, c, t, g, unknown or other
acgaacgctggcggcgcgttttaagcatgcaagtcgaacggcaaggtaagagcttgctcttaccctagagtggcggactggtgagtaacgcgtgggtaatctacctttaggatggggatagctactagaaatagtagataataccgaatgtgcttatatgttaaatcatgtaaggaaagggagctaaggctttgcctaaagaagagctcgcgtcccattagctagttggtatggtaagagcgtaccaaggcaacgatgggtatccgacctgagagggtgatcggacacattgggactgagacacagcccagactcctacgggaggcagcagctaagaatcttccgcaatgggcgcaagcctgacggagcgacgccgcgtgaatgaagaaggccgaaaggttgtaaaattcttttaagtttgaagaataatcagtrtagggaatgatactgagatgacggtaaaacttgaataagccccggctaattacgtgccagcagccgcggtaacacgtaaggggcgagcgttgttcggaattattgggcgtaaagggtatgcaggcggttagataagcccgatgtgaaatgctcaagcttaacttgagaactgcattaggtactgtttaacttgaatcacgaaggggaaactggaattccgggtgtaggggtggaatctgtagatatccggaggaataccggtggcgaaggcgggtttctggtcgatgattgacgctgagatacgaaagtgtggggagcaaacaggattagatgccctggtagtccacaccataaacgatgtacactaggtgttggggcaagagcttcagtgccgaagcaaacgtgataagtgtaccgcctggggagtatgccggcaacggtgaaactcaaaggaattgacgggggcccgcacaagcggtggagcatgtggtttaattcgaggatacgcgaggaaccttacctgggtttgacatcaagagtaatacggtagagatactgtagcgtagcaatacgacttttgacaggtgctgcatggctgtcgtcagctcgtgccgtgaggtgttgggttaagtcccgcaacgagcgcaacccctactgccagttactaacaggtgaagctgaggactctggcggaactgccgatgacaaatcggaggaaggtggggatgacgtcaagtcatcatggcccttatgcccagggctacacacgtgctacaatggttgctacagaatgaagctaaactgcgaagtggagcgaaacgtaaaaaagcaatcgtagtccggattgaagtctgaaacccgacttcatgaagttggaatcgctagtaatcgcacatcagcacggtgcggtgaatacgttcctgggccttgtacacaccgcccgtcacaccatccgagtcgaagatacccgaagtcgcttgtttaacccgcaagggaggacggtgccgaaggnatgtttng

SEQ ID NO: 1937 - DNA, 1477 bp, Treponema socranskii
  modified_base (1458)..(1458): a, c, t, g, unknown or other
gctcagaacgaacgctggcggcgcgtcttaaccatgcaagtcgagcggcaggcagcaatgccgagagcggcggactggtgagtaacacgtggataacgtaccccgatgcccgggacagcctgtagaaatagagggtgataccggatagatcactgtatacggaaggtagacagcgggaaaggagcttcggctccgcgccgggaacggtctgcggcccatcagctggacggcggggtaacggcccgccgtggcgaggacgggtatccggcctgagagggcggacggacacattgggactgagatacggcccagactcctacgggaggcagcaggtaagaatattccgcaatggggggaaccctgacggagcgacgccgcgtgaacgaagaaggccggaaggttgtaaagttcttttctgtccgaggaataagtgtaggaggaaatgcctgcatggtgacggtaggacaggaataagcaccggctaattacgtgccagcagccgcggtaacacgtaaggtgcgagcgttgttcggaattattgggcgtaaagggcatgcaggcgggtcgccaagcttggtaagaaataccggggctcaactccggagctatattgagaactggcgagctggagttgccgaagggtatccggaattccgcgtgaaggggtgaaatctgtagatatgcggaagaacaccgatggcgaaggcaggataccggcggacgactgacgctgaggtgcgaaggtgcggggagcaaacaggattagataccctggtagtccgcacagtcaacgatgtacactgggcgtgtgcgcaagagcgtgcgtgccgaagcaaacgcgataagtgtaccgcctggggagtatgcccgcaagggtgaaactcaaaggaattgacgggggcccgcacaagcggtggagcatgtggtttaattcgatggtacgcgaggaaccttacctgggtttgacatcaagagggatcatatagagatatgtgagcgtagcaatacggctcttgacaggtgctgcatggctgtcgtcagctcgtgccgtgaggtgttgggttaagtcccgcaacgagcgcaacccctactgccggttactaacaggtaaagctgaggactcaggcggaactgcctgcgacaagcaggaggaaggcggggacgacgtcaagtcatcatggcccttatgtccagggctacacacgtgctacaatggccgccacagagcgaggcgaagccgagaggcggagcagaacgcagaaaagcggtcgtagtccggattgaagtctgaaactcgacttcatgaagctggaatcgctagtaaccgcacatcagcacggcgcggtgaatacgttcccgggccttgtacacaccgcccgtcacaccatccgagcagggggtacccgaagccggcagtccaaccgcaagggggacgctgtcgaaggtacgctttgtgangggggtgaagtcgtaacaa

SEQ ID NO: 1938 - DNA, 1498 bp, Treponema sp.
  6:H:D15A-4
cggcgcgtcttaaccatgcaagtcgagcggcaggcagcaatgccgagagcggcggactggtgagtaacacgtggataacgtaccccgatgcccgggacagcctgtagaaatagagggtaataccggataggtcaccatattcgcaagggatatggcgggaaaggagcttcggctccgcgccgggaacggtctgcggcccatcagctggacggcggggtaaaagcccgccgtggcgaggacgggtatccggcctgagagggcggacggacacattgggactgagatacggcccagactcctacgggaggcagcaggtaagaatattccgcaatggggggaaccctgacggagcgacgccgcgtgaacgaagaaggccggaaggttgtaaagttcttttctgttcgaggaataagtgtaggaggaaatgcctgcatggtgacggtagggcaggaataagcaccggctaattacgtgccagcagccgcggtaacacgtaaggtgcgagcgttgttcggaattattgggcgtaaagggcatgcaggcgggtcgccaagcttgatgagaaataccggggctcaactccggagctatattgagaactggcgagctagagttgccgaagggtatccggaattccgcgtgaaggggtgaaatctgtagatatgcggaagaacaccgatggcgaaggcaggataccggcggacgactgacgctgaggtgcgaaggtgcggggagcaaacaggattagataccctggtagtccgcacagtcaacgatgtacactgggcgtgtgcgcaagagcgtgcgtgccgaagcaaacgcgataagtgtaccgcctggggagtatgcccgcaagggtgaaactcaaaggaattgacgggggcccgcacaagcggtggagcatgtggtttaattcgatggtacgcgaggaaccttacctgggtttgacatacacagcaatcatatagagatatgtgagcgtagcaatacggctgtgaacaggtgctgcatggctgtcgtcagctcgtgccgtgaggtgttgggttaagtcccgcaacgagcgcaacccctactgccggttactaacaggtaaagctgaggactcaggcggaactgcctgcgacaagcaggaggaaggcggggacgacgtcaagtcatcatggcccttatgtccagggctacacacgtgctacaatggccgccacagagcggggcgaagccgagaggcggagcagaacgcagaaaagcggtcgtagtccggattgaagtctgaaactcgacttcatgaagctggaatcgctagtaaccgcacatcagcacggcgcggtgaatacgttcccgggccttgtacacaccgcccgtcacaccatccgagcagggggtacccgaagccggcagtccaaccgcaagggggacgctgtcgaaggtacgctttgtgaggggggtgaagtcgtaacaaggtagtcgtaccggaaggtgcggctggawcacctccttc

SEQ ID NO: 1939 - DNA, 1404 bp, Treponema sp.
  clone DDKL-4
  modified_base (821)..(821): a, c, t, g, unknown or other
  modified_base (831)..(831): a, c, t, g, unknown or other
  modified_base (840)..(841): a, c, t, g, unknown or other
  modified_base (843)..(843): a, c, t, g, unknown or other
  modified_base (886)..(886): a, c, t, g, unknown or other
tagagtggcggactggtgagtaacgcgtgggtgatctgcccttaagatggggatagctcctagaaataggaggtaataccgaatacgcttatacggataaagccgtataaggaaaggaggctacggccttgcttgaggatgagcccgcgtcccattatgcttgttggtgaggtaacggcttaccaaggcgacgatgggtatccggcctgagagggtggacggacacattgggactgagatacggcccaaactcctacgggaggcagcagctaagaatattccgcaatggacggaagtctgacggagcgacgccgcgtggacgaagaaggccgaaaggttgtaaagttcttttgccgatgaagaataagaggatgagggaatgcgtccttgatgacggtagtcgagcgaataagccccggctaattacgtgccagcagccgcggtaacacgtaaggggcgagcgttgttcggaattattgggcgtaaagggcacgcaggcgggttggtaagcctgatgtgaaatactcaagcttaacttgagaattgcattgggtactgccagtsttgaatcacggaggggaaaccggaattccaagtgtaggggtggaatctgtagatatttggaagaacaccggtggcgaaggcgggtttctggccgatgattgacgctgaggtgcgaaggtgtggggagcaaacaggattagataccctggtagtccacacagtaaacgatgtacactaggtgttgggcaagagcttcagtgccggcgcaaacgcaataagtgtaccgcctggggagtatgcccgcaagggtgaaactnaaaggaattnacgggggcnngnacaagcggtggagcatgtggtttaattcgatgatacgcgaggnatcttacctgggtttgacatcaaaagcaatattatagagatatggtagcgtagcaatacggcttttgacaggtgctgcatggctgtcgtcagctcgtgccgtgaggtgttgggttaagtcccgcaacgagcgcaacccctactgtcagttgctaacaggtaacgctgaggactctggcggaactgccgatgacaaatcggaggaaggtggggatgacgtcaagtcatcatggcccttatgtccagggctacacacgtgctacaatggttgctacaaagtgaagcgagactgtgaggttaagcaaatcgcaaaaaagcaatcgtagttcggattgaagtctgaaactcgacttcatgaagttggaatcgctagtaatcgcacatcagcacggtgcggtgaatacgttcccgggccttgtacacaccgcccgtcacaccatccgagttgagggtacccgaagtcgccagtctaacccgtaagggagggcggtgccgaaggtatgtttggcaaggagggtg

SEQ ID NO: 1940 - DNA, 1327 bp, Treponema sp.
  oral clone JU025
ggagtttgatcctggctcagaacgaacgctggcggcgcgtcttaaacatgcaagtcgaacgagtggcggactggtgagtaacacgtgggtgatataccttttagttggggatagctgttagaaatagcaggtaataccgaatgtggaaagccgctagaagaatggctcgcggcccattagctcgttggtgaggtaacggcccaccaaggcaatgatgggtatccggcctgagagggtgaacggacacattgggactgagatacggcccagacttctacgggaggcagcagttaagaatattccgcaatggacgaaagtctgacggagcgacgccgcgtggatgaagaatgccgaaaggttgtaaaatccttttaagcctgaggatgacagtagggcttgaataagcaacggctaattacgtgccagcagccgcggtaacacgtaagttgcgagcgttgttcggaattattgggcgtaaagggcatgtaggcggatatgcaagcttggtgtgaaatactgcagcttaactgcggaactgcattgagaactgcacatcttgaattactgaagggtaaccagaattccacgtgtaggggtgaaatctgtagatatgtggaagaataccaatggcgaaggcaggttaccggcagaattgacgctgaggtgcgaaagtgcggggagcgaacaggattagataccctggtagtccgcaccgtaaacgatgtacactaggtgtccggcgctgggtgccaaagcaaacgtgataagtgtaccgcctggggagtatgcccgcaagggtgaaactcaaaggaattgacgggggcccgcacaagcggtggagcatgtggtttaattcgatggtacgcgaggaaccttacctgggtttgacataaacaggtgctgcatggctgtcgtcagctcgtgccgtgaggtgttgggttaagtcccgcaacgagcgcaacccctactgccagttactaacagctgaggactctggcggaactgccggtgacaaaccggaggaaggtggggatgacgtcaagtcatcatggcccttatgtccagggctacacacgtgctacaatggtaggcaaagtgaggcgaagctgtaaagcggagcaaaacgcaaactatcgtagtccggatggagtctgaaactcgactccagaagttggaatcgctagtaatcgcgcatcagcacggcgcggtgaatacgttcccgggccttgtacacaccgcccgtcacaccatccgagtagagggtacccgaagtcggtgtctaggacgctgccgaaggtatgttttgtaaggagggtgaagtcgtaac

SEQ ID NO: 1941 - DNA, 1327 bp, Treponema sp.
  oral clone JU031
ggagtttgatcctggctcagaacgaacgctggcggcgcgtcttaagcatgcaagtcgaacgagtggcggactggtgagtaacacgtgggtgatctacccttgagatggggatagccgttaggaatagcgggtaataccgaatacagaaagtcgctcgaggatgagcttgcgtcccattagctagttggtgaggtaagggcccaccaaggcgacgatgggtatccggcctgagagggtgaacggacacattgggactgagatacggcccaaactcctacgggaggcagcagctaagaatattccgcaatggacggaagtctgacggagcgacgccgcgtggatgaagaaggctgaaaagttgtaaaatccttttgctgatgaagatgacgataatcggcgaataagccccggctaattacgtgccagcagccgcggtaacacgtaaggggcgagcgttgttcggaattattgggcgtaaagggcatgtaggcggttatgtaagcctgatgtgaaatgctggggctcaaccccagaactgcattgggtactgcgtagcttgaattacggaagggaaactggaattccaagtgtaggggtggaatctgtagatatttggaagaacaccggtggcgaaggcgggtttctggccgaattgacgctgagatgcgaaagtgtggggatcgaacaggattagataccctggtagtccacaccgtaaacgatgtacactaggtgctggagcttcagtgccaaagcaaacgtgataagtgtaccgcctggggagtatgcccgcaagggtgaaactcaaagggattgacgggggcccgcacaagcggtggagcatgtggtttaattcgatggtacgcgaggaaccttacctgggttcgacatcgacaggtgctgcatggctgtcgtcagctcgtgccgtgaggtgttgggttaagtcccgcaacgagcgcaacccctactgccagttactagcagctgaggactctggcggaactgccgatgacaaatcggaggaaggtggggatgacgtcaagtcatcatggcccttatgtccagggctacacacgtgctacaatggttgccaaagcgaagcgatgctgtgaggctaagcaaaccgcaagcaatcgtagttcggatgaagtctgaaactcgacttcagaagttggaatcgctagtaatcgcgcatcagcacggcgcggtgaatacgttcccgggccttgtacacaccgcccgtcacaccatccgagttgagggtacccgaagtcgctgtctaggacggtgccgaaggtacgtttggtaaggagggtgaagtcgtaac

SEQ ID NO: 1942 - DNA, 1295 bp, Treponema sp.
  oral clone P2PB_53 P3
aacgaacgctggcggcgcgtcttaagcatgcaagtcgaacgagtggcggactggtgagtaacgcgtgggtgacctgccctgaagatggggatagctagtagaaatattagataataccgaatgtggaaagccgcttcaggatgggcctgcgtcccattagctggttggtgaggtaaaggctcaccaaggcaacgatgggtatccggcctgagagggtgaacggacacattgggactgagatacggcccaaactcctacgggaggcagcagctaagaatcttccgcaatggacgaaagtctgacggagcgacgccgtgtgaatgaagaaggccgaaaggttgtaaaattcttttgcagatgaagatgacggtaatctgcgaataagccccggctaattacgtgccagcagccgcggtaacacgtaaggggcgagcgttgttcggaattattgggcgtaaagggtatgtaggcggttaggtaagcctggtgtgaaatctacgagctcaactcgtaaactgcatcgggtactgcttgacttgaatcacggaggggaaaccggaattccaagtgtaggggtggaatctgtagatatttggaagaacaccggtggcgaaggcgggtttctggccgaattgacgctgatatacgaaggtgcggggagcaaacaggattagataccctggtaatccgcacagtaaacgatgtacactaggtgtcggagcttcggtgccgacgcaaacgcattaagtgtaccgcctgggaagtatgcccgcaagggtgaaactcaaaggaattgacgggggcccacacaagcggtggagcatgtggtttaattcgatgatacgcgagaaaccttacctgggttgacatcgacaggtgctgcatggctgtcgtcagctcgtgccgtgaggtgttgggttaagtcccgcaacgagcgcaacccctactgccagttactaacagctgaggactctggcggaactgccgatgacaaatcggaggaaggtggggatgacgtcaagtcatcatggcccttacgtccagggctacacacgtgctacaatggttgccaaatcgaagcgacaccgcgaggtcaagcaaaacgcagcaatcgtagtccggatgaagtctgaaactcgacttcagaagttggaatcgctagtaatcgcacatcagcacggtgcggtgaatacgttcctgggccttgtacacaccgcccgtcataccatccgagtcgagggtacccgaagtcgctgtctaggacggtgccgaaggtacgtttggtaaggagggtg

SEQ ID NO: 1943 - DNA, 1460 bp, Treponema sp.
  oral taxon 228
aacgaacgctggcggcgcgtcttaagcatgcaagtcgaacggcaagagaggagcttgcttctctcctagagtggcggactggtgaggaacgcgtgggtaatctacccttaagatggggatagccgctagaaatagcgggtaataccaatagacttatagctgagaaagaagtgataaggaaaggaagctaaggcttcgcttaaggatgagcctgcgtcccattagctagttggtaaggtaacggcctaccaaggcgacgatgggtatccggcctgagagggtgaacggacacattgggactgagatacggcccaaactcctacgggaggcagcagctaagaatattccgcaatggacgaaagtctgacggagcgacgccgcgtggatgaagaaggctgaaaagttgtaaaatccttttgttgatgaagaataagggtgagagggaatgttcatctgatgacggtaatcagcgaataagccccggctaattacgtgccagcagccgcggtaacacgtaaggggcgagcgttgttcggaattactgggcgtaaagggcatgtaggcggttatgtaagcctgatgtgaaatcctgaggcttaacctcagaatagcattgggtactgtgtaacttgaattacggaagggaaactggaattccaagtgtaggggtggaatctgtagatatttggaagaacaccggtggcgaaggcgggtttctggccgataattgacgctgagatgcgaaagtgtggggatcgaacaggattagataccctggtagtccacaccgtaaacgatgtacactaggtgttggggcaagagcttcagtgccaaagtaaacgcgataagtgtaccgcctggggagtatgcccgcaagggtgaaactcaaaggaattgacgggggcccgcacaagcggtggagcatgtggtttaattcgatggtacgcgaggaaccttacctgggtttgacatctagtggaatgtcttagagataaggcagtgtagcaatacaccgctagacaggtgctgcatggctgtcgtcagctcgtgccgtgaggtgttgggttaagtcccgcaacgagcgcaacccctactgccagttactaacaggtaaagcttgagactctggcggaactgccgatgacaaatcggaggaaggtggggatgacgtcaagtcatcatggcccttatgtccagggctacacacgtgctacaatggttgctacaaagcgaagcgagaccgtaaggtggagcaaaccgcaaaaaagcaatcgtagttcggattgaagtctgaaactcgacttcatgaagttggaatcgctagtaatcgcgcatcagcacggcgcggtgaatacgttcccgggccttgtacacaccgcccgtcacaccatccgagttgggggtgcccgaagtcgcttgtctaacccgcaagggagacggtgccgaaggtacgcttggta

SEQ ID NO: 1944 - DNA, 1423 bp, Treponema sp.
  oral taxon 230
aacgaacgctggcggcgcgtcttaagcatgcaagtcgaacggcaagagaggagcttgcttctctcctagagtggcggactggtgaggaaccgtgggtaatctacccttaagatggggatagcgtagaaatagcgtaataccgaatactggaggaaagggctaggctcgctaggatgagcgcgtcccattagctagttggtaggtaaggccaccaaggcgacgatgggtatccggcctgagagggtgacggacacattgggactgagatacggcccaaactcctacgggaggcagcagctaagaatattccgcaatggacggtctgacggagcgacgccgcgtggatgaagaaggctgaaaagttgtaaaatccttttgttgatgaggaataagggtgagagggaatgctcatctgatgacggtaatcgacgaataagccccggctaattacgtgccagcagccgcggtaacacgtaaggggcgagcgttgttcggaattattgggcgtaaagggcatgtaggcggttatgtaagcctgatgtgaaatcctggggcttaaccctagaatagcattgggtactgtataacttgaattacggaaggggaactggaattccaagtgtaggggtggaatctgtagatatttggaagaacaccggtggcgaaggcgggtttctggccgataattgacgctgagatgcgaaagtgtggggatcgaacaggattagataccctggtagtccacaccgtaaacgatgtacactaggtgttggggcaagagcttcagtgccaaagcaaacgcgataagtgtaccgcctggggagtatgcccgcaagggtgaaactcaaaggaattgacgggggcccgcacaagcggtggagcatgtggtttaattcgatggtacgcgaggaaccttacctgggtttgacatctagtggaatgccttagagataaggtagtgtagtttactacaccgctagacaggtgctgcatggctgtcgtcagctcgtgccgtgaggtgttgggttaagtcccgcaacgagcgcgacccctattgccagttactaacaggtaaagcttgaggactctggcggaactgccgatgacaaatcggaggaaggtggggatgacgtcaagtcatcatggcccttatgtccagggctacacacgtgctacaatggctgctacaaagcgaggcgagactgtgaaggtgagcaaaccgcaaaaaagcagccgtagttcggattgaagtctgaaactcgacttcatgaagttggaatcgctagtaatcgcgcatcagcacggcgcggtgaatacgttcccgggccttgtacacaccgcccgtcacaccatccgagttgggggtacccgaagtcgctcgtctaacccgtaagggaggacggtgccgaaggtacgcttggtg

SEQ ID NO: 1945 - DNA, 1439 bp, Treponema sp.
  oral taxon 231
aacgaacgctggcggcgcgtcttaagcatgcaagtcgaacggcaagagaggagcttgcttctctcctagagtggcggactggtgaggaacacgtgggtaatctacccttaagatggggatagctgctagaaatagcagataataccgaatacactcggcgcttcataagaggcgttgaggaaaggaagctacggcttcgcttgaggatgagcttgcgtcccattagctagttggtgaggtaacggcccaccaaggcgacgatgggtatccggcctgagagggtgaacggacacattgggactgagatacggcccaaactcctacgggaggcagcagctaagaatattccgcaatggacggaagtctgacggagcgacgccgcgtggatgaagaaggctgaaaagttgtaagatccttttgttgatgaagaataaggatgagagggaatgctcatctgatgacggtaatcgacgaataagccccgttacgtgccagcagccgcggtaacacgtaaggggcgagcgttgttcggaattattgggcgtaaagggcatgtaggcggttatgtaagcctgtgtgaaatctgggcttaaccctgaaagcattgggtactgttacttgaattacggaagggaactgaattccaagtgtaggggtggaatctgtgatatttggaagaacaccggtggcgaaggcgggtttctggccgataattgacgctgagtgcgaaagtgtggggatcgaacaggattagataccctggtagtccacactgtaaacgatgtacactaggtgttgggaagagcttcagtgccaaagaaacggataagtgtaccgcctggggagtatgcccgcaagggtgaaactcaaaggaattgacgggggcccgcacaagcggtggagcatgtggtttaattcgatggtacgcgaggaaccttacctgggtttgacatctaggagtagagataagtagcaataccgctagacaggtgctgcatggctgtcgtcagctcgtgccgtgaggtgttgggttaagtcccgcaacgagcgcaacccctactgccagttactaacaggtaaagcttgaggactctggcggaactgccgatgacaaatcggaggaaggtggggatgacgtcaagtcatcatggcccttatgtccagggctacacacgtgctacaatggttctacaaagcgagcaaccgtaggggagcaaaccgcaaaaaagcaatcgtagttcggattgaagtctgaaactcgacttcatgaagttggaatcgctagtaatcgcgcatcagcacggtgcggtgaatacgttcccgggccttgtacacaccgcccgtcacaccatccgagttgggggtacccgaagtcgcttgtctaaccgcaaggggacggtgccgaggtacgcttggtaaggagggtgaagtcgtaacaa

SEQ ID NO: 1946 - DNA, 1482 bp, Treponema sp.
  oral taxon 232
aacgaacgctggcggcgcgtcttaagcatgcaagtcgaacggcaagagaggagcttgcttctctcctagagtggcggactggtgaggaacgcgtgggtaatctacccttaagatggggatagccgctagaaatagcgggtaataccgaatagacttatagctgagaaagaagtgataaggaaaggaagctaaggcttcgcttaaggatgagcctgcgtcccattagctagttggtaaggtaacggcctaccaaggcgacgatgggtatccggcctgagagggtgaacggacacattgggactgagatacggcccaaactcctacgggaggcagcagctaagaatattccgcaatggacggaagtctgacggagcgacaccgcgtggatgaagaaggctgaaaagttgtaaaattcttttgctgatgaagaataaagataagagggaatgcttatcagatgacggtagtcggcgaataagccccggctaattacgtgccagcagccgcggtaacacgtaaggggcgagcgttgttcggaattattgggcgtaaagggcatgcaggcggttgtgtaagcctgatgtgaaatcctgaggcttaaccttggggctgcattgggtactgcacgacttgaattacggaaggggaactggaattccaagtgtaggggtggaatctgtagatatttggaagaacaccggtggcgaaggcgggtttctggccgataattgacgctgagatgcgaaagtgtggggatcgaacaggattagataccctggtagtccacactgtaaacgatgtacactaggtgttggggtaacaatctcagtgccgaagcaaacgtgataagtgtaccgcctggggagtatgcccgcaagggtgaaactcaaaggaattgacgggggcccgcacaagcggtggagcatgtggtttaattcgatggtacgcgaggaatcttacctgggtttgacatctagtgggatactttagagataaggtagtgtagcaatacaccgctagacaggtgctgcatggctgtcgtcagctcgtgccgtgaggtgttgggttaagtcccgcaacgagcgcaacccctactgccagttactaacaggtaaagcttgaggactctggcggaactgccgatgacaaatcggaggaaggtggggatgacgtcaagtcatcatggcccttatgtccagggctacacacgtgctacaatggctgctacaaagcgaggcgagactgtgaaggtgagcaaaccgcaaaaaagcagccgtagttcggattgaagtctgaaactcgacttcatgaagttggaatcgctagtaatcgcgcatcagcacggcgcggtgaatacgttcccgggccttgtacacaccgcccgtcacaccatccgagttgagggtacccgaagtcgcttgtctaacccgcaagggaggacggtgccgaaggtatgcttggtgaggagggtgaagtcgtaac

SEQ ID NO: 1947 - DNA, 1480 bp, Treponema sp.
  oral taxon 235
aacgaacgctggcggcgcgtcttaagcatgcaagtcgaacggcaagagaggagcttgcttctctcctagagtggcggactggtgaggaacacgtgggtaatctacccttaagatggggatagctgctagaaatagcagataataccgaatacactcaatttttcataagaggagttgaggaaagaggctacggcctcgcttaaggatgagcttgcgtcccattagctagttggtgaggtaaaggctcaccaaggcgacgatgggtatccggcctgagagggtgaacggacacattgggactgagatacggcccaaactcctacgggaggcagcagctaagaatattccgcaatggacggaagtctgacggagcgacgccgcgtggatgaagaaggctgaaaagttgtaaaatccttttgttgatgaagaataagggtaagagggaatgcttgcctgatgacggtaatcggcgaataagccccggctaattacgtgccagcagccgcggtaacacgtaaggggcgagcgttgttcggaattattgggcgtaaagggcatgtaggcggttatgtaagcctgatgtgaaatgccggggcttaaccccggaacagcattgggtactgtataacttgaattacggaagggaaactggaattccaagtgtaggggtggaatctgtagatatttggaagaacaccggtggcgaaggcgggtttctggccgataattgacgctgagatgcgaaagtgtggggatcgaacaggattagataccctggtagtccacaccgtaaacgatgtacactaggtgttggggcaagagcttcagtgccaaagcaaacgcgataagtgtaccgcctggggagtatgcccgcaagggtgaaactcaaaggaattgacgggggcccgcacaagcggtggagcatgtggtttaattcgatggtacgcgaggaaccttacctgggtttgacatctagaggaatactgtagagatacggtagcgtagcaatacgccgctagacaggtgctgcatggctgtcgtcagctcgtgccgtgaggtgttgggttaagtcccgcaacgagcgcaacccctactgccagttactaacaggtaacgcttgaggactctggcggaactgccgatgacaaatcggaggaaggtggggatgacgtcaagtcatcatggcccttatgtccagggctacacacgtgctacaatggttgctacaaagcgaagcaagaccgtaaggtggagcaaaccgcaaaaaagcaatcgtagttcggattgaagtctgaaactcgacttcatgaagttggaatcgctagtaatcgcgcatcagcacggcgcggtgaatacgttcccgggccttgtacacaccgcccgtcacaccatccgagttgggggtacccgaagtcgcttgtctaacctgcaaagggggacggtgccgagggtacgcttggtaaggagggtgaagtcgtaa

SEQ ID NO: 1948 - DNA, 1461 bp, Treponema sp.
  oral taxon 239
aacgaacgctggcggcgcgtcttaagcatgcaagtcgaacggcaagagaggagcttgcttctctcctagagtggcggactggtgaggaacacgtgggtaatctacccttaagatggggatagctgctagaaatagcaggtaataccgaataccctcacgttcataaagggatgtgaggaaaggaagctacggcttcgctcgaggatgagcctgcgtcccattagctagttggtgaggtaaaggcccaccaaggcgacgatgggtatccggcctgagagggtgatcggacacattgggactgagatacggcccaaactcctacgggaggcagcagctaagaatattccgcaatggacggaagtctgacggagcgacgccgcgtggatgaagaaggctgaaaagttgtaaaatccttttgctgatgaagaataagggtaggagggaatgcctatctgatgacggtaatcggcgaataagccccggctaattacgtgccagcagccgcggtaacacgtaaggggcgagcgttgttcggaattattgggcgtaaagggcatgtaggcggttatgtaagcctgatgtgaaatactggggctcaaccccagaactgcattgggtactgcgtagcttgaattacggaagggaaactggaattccaagtgtaggggtggaatctgtagatatttggaagaacaccggtggcgaaggcgggtttctggccgataattgacgctgagatgcgaaagtgtggggatcgaacaggattagataccctggtagtccacaccgtaaacgatgtacactaggtgctggagtggaagcttcagtgccaaagcaaacgtgataagtgtaccgcctggggagtatgcccgcaagggtgaaactcaaaggaattgacgggggcccgcacaagcggtggagcatgtggtttaattcgatggtacgcgaggaaccttacctgggtttgacatctagtggaatgttttagagataagacagtgtagcaatacaccgctagacaggtgctgcatggctgtcgccagctcgtgccgtgaggtgttgggttaagtcccgcaacgagcgcaacccctactgccagttactaacaggtaaagcttgaggactctggcggaactgccgatgacaaatcggaggaaggtggggatgacgtcaagtcatcatggcccttatgtccagggctacacacgtgctacaatggttgctacaaagcgaagcgatgctgtgaggctaagcaaaccgcaaaaaagcaatcgtagttcggattgaagtctgaaactcgacttcatgaagttggaatcgctagtaatcgcgcatcagcacggcgcggtgaatacgttcccgggccttgtacacaccgcccgtcacaccatccgagttgagggtacccgaagtcgctcgtctaacctgcaaaggaggacggtgccgaaggtacgtttggta

SEQ ID NO: 1949 - DNA, 1463 bp, Treponema sp.
  oral taxon 247
aacgaacgctgacggcgcgtcttaagcatgcaagtcgaacggtaagagaggagcctaggtgttctcctagagtggcggactggtgagtaacgcgtgggtgacctgccctaaagatggggatagctagtagaaatattagataataccgaatgtgctcatttacataaaggtagatgaggaaagggggctacggctccgctttaggatgggcccgcgtcccattagctcgttggtgaggtaacggcccaccaaggcaacgatgggtatccggcctgagagggtgaacggacacattgggactgagatacggcccaaactcctacgggaggcagcagctaagaatcttccgcaatggacgaaagtctgacggagcgacgccgtgtgaatgaagaaggccgaaaggttgtaaaattcttttgcagatgaagaataaggataagagggaatgcttgtccgatgacggtagttatgcgaataagccccggctaattacgtgccagcagccgcggtaacacgtaaggggcgagcgttgttcggaattattgggcgtaaagggcatgtaggcggttaggtaagcctgatgtgaaatctacgagcttaactcgtaaactgcattgggtactgcttgacttgaatcacggaggggaaaccggaattccaagtgtaggggtggaatctgtagatatttggaagaacaccggtggcgaaggcgggtttctggccgatgattgacgctgatatgcgaaggtgcggggagcaaacaggattagataccctggtagtccgcacagtaaacgatgtacactaggtgttggggcaagagcttcagtgcctaagcaaacgcaataagtgtaccgcctgggaagtatgcccgcaagggtgaaactcaaaggaattgacgggggcccacacaagcggtggagcatgtggtttaattcgatgatacgcgaggaaccttacctgggtttgacatcaagagcaatactatagagatatggtagcgtagcaatacggctcttgacaggtgctgcatggctgtcgtcagctcgtgccgtgaggtgttgggttaagtcccgcaacgagcgcaacccctactgccagttactaacaggtaaagcttgaggactctggcggaactgccgatgacaaatcggaggaaggtggggatgacgtcaagtcatcatggcccttacgtccagggctacacacgtgctacaatggttgctacaaatcgatgcaaaaccgtgaggtcaagcaaaacgcaaaaaagcaatcgtagtccggattgaagtctgaaactcgacttcatgaagttggaatcgctagtaatcgcacatcagcacggtgcggtgaatacgttcctgggccttgtacacaccgcccgtcacaccatccgagtcgagggtacccgaagtcgccagtctaacctgcaaagggggacgacgccgaaggtacgcttggta

SEQ ID NO: 1950 - DNA, 1470 bp, Treponema sp.
  oral taxon 250
aacgaacgctggcggtgcgtcttaagcatgcaagtcgaacggtaagaggggagcttagctcccttcctagagtggcggactggtgagtaacgcgtggatgatctacctttgagatggggatagcttctagaaataggagataataccgaataaccttattgcgttttgatgtagtaagaaaaggagcgtcagctccgcttaaagatgagtctgcgtcccattagctagttggtaaggtaaaggcctaccaaggcgacgatgggtacccggcctgagagggtgaacgggcacattgggactgagatacggcccaaactcctacgggaggcagcagctgagaatcttccgcaatggacgaaagtctgatggagcgacaccgcgtgaacgatgaaggccggaaggttgtaaagttcttttgcagacaaagaataaggatagaaggaaatgactatctgatgacggtagttatgcgaataagccccggctaattacgtgccagcagccgcggtaatacgtaaggggcgagcgttgttcggaattattgggcgtaaagggcatgtaggcggttaggtaagcctgatgtgaaatgtatgagcttaactcataaactgcattgggtactgcttgacttgaatcatggaggggaaactggaattccaagtgtaggggtggaatctgtagatatttggaagaacaccggtggcgaaggcgggtttctagccaatgattgacgctaaggtgcgaaggtgcggggagcaaacaggattagataccctggtagtccgcacagtaaacgatgtacactaggtgttggggtaagactcagtgccgaaagcaaacgcaataagtgtaccgcctggggagtatgcccgcaagggtgaaactcaaaggaattgacgggggcccacacaagcggtggagcatgtggtttaattcgatgatacgcgaggaaccttacctgggtttgacatcaagagggatactgtagagatatggtagcgtagcaatacgactcttgacaggtgctgcatggctgtcgtcagctcgtgccgtgaggtgttgggttaagtcccgcaacgagcgcaacccctactgccagttactaacaggtaaagcttgaggactctggcggaactgccggtgataaaccggaggaaggtggggatgacgtcaagtcatcatggcccttatgtccagggctacacacgtgctacaatggttgttacaaagtgaagcgaagccgcgaggttaagcgaatggcaaaaaagcaatcgtagtccagattggaatctgaaacctgattccatgaagctggaatcgctagtaatcgcatatcagcacgatgcggtgaatacgttcctgggccttgtacacaccgcccgtcacaccatccgagtcgaaggtacccgaagacgctagtctaaccgtaaggaggacggtggcgaaggtacgtttggtaaggagggtgaa

SEQ ID NO: 1951 - DNA, 1461 bp, Treponema sp.
  oral taxon 251
aacgaacgctggcggtgcgtcttaagcatgcaagtcgaacggtaagaagagagcttgctcttttcctagagtggcggactggtgagtaacgcgtggatgatctacctttaagatggggatagcttctagaaataggagataataccgaataaccttatcgtgttatgacgtgataagaaaatggagcgttagctccgcttgaagatgagtctgcgtcccattagctagttggtagggtaaaggcttaccaaggcgatgatgggtatccggcctgagagggtgaacggacacattgggactgagacacggcccaaactcctacgggaggcagcagctgagaatcttccgcaatggacgaaagtctgacggagcgacaccgcgtgaacgatgaaggccggaaggttgtaaagttcttttgcagacaaagaataaggatagaaggaaatgactatctgatgacggtagttatgcgaataagccccggctaattacgtgccagcagccgcggtaatacgtaaggggcgagcgttgttcggaattattgggcgtaaagggcatgtaggcggttaggtaagcctgatgtgaaatgtatgagcttaactcataaactgcattgggtactgcttgacttgaatcatggaggggaaactggaattccaagtgtaggggtggaatctgtagatatttggaagaacaccggtggcgaaggcgggtttctagccaatgattgacgctaaggtgcgaaggtgcggggagcaaacaggattagataccctggtagtccgcacagtaaacgatgtacactaggtgttggggtaagactcagtgccaaagcaaacgcaataagtgtaccgcctggggagtatgcctgcaagggtgaaactcaaaggaattgacgggggcccacacaagcggtggagcatgtggtttaattcgatgatacgcgaggaaccttacctgggtttgacatcaagagggatgctatagagatatggtagcgtagtaatacgtctcttgacaggtgctgcatggctgtcgtcagctcgtgccgtgaggtgttgggttaagtcccgcaacgagcgcaacccctactgccagttactaacaggtaaagctgaggactcaggcggaactgccggtgataaaccggaggaaggtggggatgacgtcaagtcatcatggcccttatgtccagggctacacacgtgctacaatggttgttacaaagtgaagcgaagccgcgaggttgagcgaatcgcaaaaaagcaatcgtagtccggattggaatctgaaacctgattccatgaagctggaatcgctagtaatcgcatatcagcacgatgcggtgaatacgttcctgggccttgtacacaccgcccgtcacaccatccgagtcgaaggtacccgaagacgctagtctaaccgtaaggaggacggtggcgaaggtatgtttggtaagga

SEQ ID NO: 1952 - DNA, 1382 bp, Treponema sp.
  oral taxon 254
aacgaacgctggcggtgcgtcttaagcatgcaagtcgaacggcaagaaagtgcttgcactttcctagagtggcggactggtgagtaacgcgtgggtgatctacctttaagatggggatagcttttagaaataagagataataccgaatgtgcttgcgatgctttggcgttgcaaggaaaggagcgtttgctcgcttaaagatgagcctgcgtcccattagctagttggtgaggtaatggcccaccaaggcgatgatgggtatccgacctgagagggtgatcggacacattgggactgagatacggcccaaactcctacgggatgcagcagctgagaatcttccgcaatggacgaaagtctgacggagcgacaccgcgtgaatgatgaaggccgaaaggttgtaaaattcttttgcagacaaagaataagtgtaggaggaaatgcctacatgatgacggtagttatgcgaataagccccggctaattacgtgcggggcgagcgttttcggaattattgggcgtaaagggcatgtaggcggtttaagcctgtgtgaatctacgagcttaactcgtaaatgcattgggtactgcttgaatcagaggggaactggaattccaagtgtaggggtggaatctgtagatatttggaagaacaccggtggcgaaggcgggtttctagcatgattgacgctatgcgaaggtgggggagcaaacaggattagataccctggtagtccgcacagtcatgtacactagtgggggtaagactcagtgggcaaacgcataagtgtaccgcctggggagtatgcccgcaaggtgaaactcaaaggaattgacgggggcccacacaagcggtggagcatgtggtttaattcgatgtacgcgaggaaccttacctgggtttgacataaggattatagagatatggtagcgtagatacgctttacaggtgctgcatggctgtcgtcagctcgtgccgtgaggtgttgggtaagtcccgcaacgagcgcaaccctactgccagttactaacaggtaaagtgaggactcggcggaactgccggtgataaaccggaggaaggtggggatgacgtcaagtcatcatggcccttatgtccagggctacacacgtgctacaatggttgttacaaagtgaagcgaagccgcgaggtgagcgaatgcaaaagcaatcgtagtcgattggaatctgaaacctgattcatgaagctggaatcgctagtaatcgctatcagcacgatgcggtgaatacgttcctgggccttgtacacaccgcccgtcacaccatccgagtcgaggtacccaagagctagtctaacgagggacggtggcgaaggtacgtggtaaggagggtgaagtcgtaac

SEQ ID NO: 1953 - DNA, 1456 bp, Treponema sp.
  oral taxon 265
aacgaacgctggcggcgcgtcttaagcatgcaagtcgaacggtaagaaggagcttgcttcttcctagagtggcggactggtgagtatcgcgtggatgacgtacccttttgacggggatagccgatagaaatatcagataataccggataatctcttttggggtaaagacgaaagaggaaagcagcttcggctgcgcaggaggaacggtccgcgtcctatcagctagtcggcagggtaaaggcctgccgaggcgacgacgggtatccggcctgagagggtggacggacacattgggactgagatacggcccagactcctacgggaggcagcagctaagaatattccgcaatggacgaaagtctgacggagcgacgccgcgtggacgatgaaggccggagggttgtaaagtccttttatccgtgaagaagaagcgtaagaggaaatgcttgcgtggtgacggtagcggatgaataagcaccggctaattacgtgccagcagccgcggtaacacgtaaggtgcgagcgttgttcggaattattgggcgtaaagggcatgcaggcggtcaggcaagcccggcgtgaaaggcgggggctcaactcccgaactgcgctgggaactgcagggcttgagtttctgaagggtagccggaattccacgtgtaggggtgaaatctgtagatatgtggaagaacaccaatggcgaaggcaggctactggcagaagactgacgctgaggtgcgaaggtgcggggagcaaacaggattagataccctggtagtccgcacagtcaacgatgtgcactagatgtctgtccacgaggatgggtgtcaaagcaaacgcgataagtgcaccgcctggggagtatgcccgcaagggtgaaactcaaaggaattgacgggggcccgcacaagcggtggagcatgtggtttaattcgatggtacgcgaggaaccttacctgggtttgacatacacagtgattatgtagagatatataagcgcagcaatgcgactgtgaacaggtgctgcatggctgtcgtcagctcgtgccgtgaggtgttgggttaagtcccgcaacgagcgcaacccctactgccagttaccagcatgtaatgatggggactctggcggaactgcctgcgacaagcaggaggaaggcggggatgacgtcaagtcatcatggcccttatgtccagggctacacacgtgctacaatggttgggacaaagcggagcgagtgcgagagtatgagcagaacgcagaaagccgatcgtagtccggattggagtctgaaactcgactccatgaagttggaatcgctagtaatcgcatatcagcacgatgcggtgaatacgttcccgggccttgtacacaccgcccgtcacaccatccgagtggagagtacccgaagccggcagtctaaccgcaagggggacgctgtcgaaggtatgcttcgtg

SEQ ID NO: 1954 - DNA, 1522 bp, Treponema sp.
  oral taxon 270
gagtttgatcctggctcagaacgaacgctggcggcgcgtcttaagcatgcaagtcgaatggcaagattggtgcttgcactgatcctagaatggcggactggtgagtaacgcgtgggtgacgtaccctttggacggggatagctgctagaaatagcagataataccggataaggtggcctgtgtcagaggcaggtcaggaaaggaacatttgttccgccgaaggaacggctcgcgagctattagctagttggtgaggtaacggcccaccaaggcgatgatagctacccggcctaagagggtgaacgggcacattgggactgagatacggcccagactcctacgggaggcagcagctaagaatattccgcaatggacgaaagtctgacggagcgacgccgcgtggatgatgaaggtcggaagattgtaaaatccttttatgactgaagaataagtatggtgagagaaacgccgtatggtgacagtaggtcatgaataagcaacggctaattacgtgccagcagccgcggtaacacgtaagttgcgagcgttgttcggaattattgggcgtaaagggcatgcaggcggaattgcaagcttggtgtgaaataccggggcttaactccggaatagcattgagaactgcaaaactagagtcactgaggggcaatcagaattccaggtgtaggggtgaaatctgtagatatctggaagaataccaatggcgaaggcaggttaccagcagatgactgacgctgaggtgcgaaggtgcggggagcaaacaggattagagaccctggtagtccgcacagtcaactatgtgcactagatgtctggtcgacagaccgggtgtcgaagcaaacgcgataagtgcaccgcctggggagtatgcccgcaagggtgaaactcaaaggaattgacgggggcccgcacaagcggtggagcatgtggtttaattcgatggtacgcgaggaaccttacctgggtttgacatacacaggaattatatagagatatgtaagcgcagcaatgcgcctgtgaacaggtgctgcatggctgtcgtcagctcgtgccgtgaggtgttgggttaagtcccgcaacgagcgcaacccctgctgccagttactaacacgtaaaggtgaggactctggcggaactgccggtgacaaaccggaggaaggcggggatgacgtcaagtcatcatggcccttatgtccagggctacacacgtgctacaatgggagatacagagtgaagcgaagcagcgatgcggagcaaaacgcagaaaacctctcgtagtccggattggagtctgaaactcgactccatgaagttggaatcgctagtaatcgcacatcagcacggtgcggtgaatacgttcccgggccttgtacacaccgcccgtcacaccatccgagtagattctacccgaagccggcagtctaaccgcaaggaggacgctgtcgaaggtaggatttgtgaggggggtgaagtcgtaacaaggtagtcgtaccggaaggtgcgg

SEQ ID NO: 1955 - DNA, 1475 bp, Treponema sp.
  oral taxon 271
aacgaacgctggcggcgcgtcttaagcatgcaagtcgaacggcaaggaagtgcttgcacttccctagagtggcggactggtgagtaacacgtgggtaacatgccttttagttggggatagctactagaaatagtagataataccgaatacgattttacagggtaaggctgtaaaaggaaaggagctacggctctgctgaaagattggctcgcggcccattagctagttggtgaggtaaatgcttaccaaggcaatgatgggtatccggcctgagagggtgaacggacacattgggactgagatacggcccagactcctacgggaggcagcagctaagaatgttccgcaatggagggaactctgacggagcgacgccgcgtggatgaagaaggtcgaaagattgtaaagttcttttgagatggaagaataagtattgcagggaatggcagtatggtgacagtacattttgaataagaggcggctaattacgtgccagcagccgcggtaacacgtaagcctcgagcgttgttcggaattattgggcgtaaagggcatgtaggcggtcataaaagcttggtgtgaaatctatgggcttaacccataaactgcgttgagaactgtatgacttgagttactgaagggaaactagaattccaggtgtaggggtggaatctgtagatatctggaagaataccaatggcgaaggcaagtttctggcagataactgacgctgaggtgcgaaggtgcggggagcaaacaggattagataccctggtagtccgcacagtaaactatgtacactaggtgtctgacataagtctgggtgccaaagcaaacgcgataagtgtaccgcctggggagtatgcccgcaagggtgaaactcaaaggaattgacgggggcccgcacaagcggtggagcatgtggtttaattcgatggtacgcgaggaaccttacctgggtttgacatagtacttaatagagtagagatactttagcgtagcaatacgaagtactacaggtgctgcatggctgtcgtcagctcgtgccgtgaggtgttgggttaagtcccgcaacgagcgcaacccctactgccagttactaacaggaaagctgaggactctggcggaactgccggtgacaaaccggaggaaggtggggatgacgtcaagtcatcatggcccttatgtccagggctacacacgtgctacaatggtagaaacagagtgaagcgaagcggcgacgtggagcaaaacgcaaaaaagctatcgtagttcggattggagtctgaaactcgactccatgaagttggaatcgctagtaatcgcacatcagcacggtgcggtgaatacgttcccgggccttgtacacaccgcccgtcacaccatccgagtagaggatacccgaagccggtagtctaaccgcaaggaggacgctgtcgaaggtatgctttgtaaggagggtgaagtcgtaacaa

SEQ ID NO: 1956 - DNA, 1381 bp, Treponema sp.
  oral taxon 508
aacgaacgctggcggtgcgtcttaagcatgcaagtcgaacggcaagaaagtgcttgcactttcctagagtggcggactggtgagtaacgcgtgggtgatctacctttaagatggggatagcttttagaaataagagataataccgaatgtgcttacggtgttttgacattgtaaggaaaggagcgtttgctccgcttaaagatgagcctgcgtcccattagctagttggtgaggtaaaggctcaccaaggcgatgatgggtatccggcctgagagggtgaccgacacattgggactgagatacggcccaaactcctacgggaggcagcagctgagaatcttccgcaatggacgaaagtctgacggagcgacaccgcgtgaatgatgaaggccgaaaggttgtaaaattcttttgcagacaaagaataaggatagtaggaaataactgtctgatgacggtagttacgcgaataagccccggctaattacgtgcggggcgagcgttttcggaattattgggcgtaaagggcatgtaggcggtttaagcctgtgtgaatctacgagcttaactcgtaaatgcattgggtactgcttgaatcagaggggaactggaattccaagtgtaggggtggaatctgtagatatttggaagaacaccggtggcgaaggcgggtttctagcatgattgacgctatgcgaaggtgggggagcaaacaggattagataccctggtagtccgcacagtcatgtacactagtgggggtaagactcagtgggcaaacgcataagtgtaccgcctggggagtatgcccgcaaggtgaaactcaaaggaattgacgggggcccacacaagcggtggagcatgtggtttaattcgatgtacgcgaggaaccttacctgggtttgacataaggattatagagatatggtagcgtagatacgctttacaggtgctgcatggctgtcgtcagctcgtgccgtgaggtgttgggtaagtcccgcaacgagcgcaaccctactgccagttactaacaggtaaagtgaggactcggcggaactgccggtgataaaccggaggaaggtggggatgacgtcaagtcatcatggcccttatgtccagggctacacacgtgctacaatggttgttacaaagtgaagcgaaccgcgaggtgagcgaatgcaaaagcaatcgtagtcgattggaatctgaaacctgattcatgaagctggaatcgctagtaatcgctatcagcacgatgcggtgaatacgttcctgggccttgtacacaccgcccgtcacaccatccgagtcgaggtacccaagagctagtctaacgagggacggtggcgaaggtacgtggtaaggagggtgaagtcgtaac

SEQ ID NO: 1957 - DNA, 1383 bp, Treponema sp.
  oral taxon 518
aacgaacgctggcggtgcgttttaagcatgcaagtcgaacggcaggaaggtgcttgcactttcctagagtggcggactggtgagtaacgcgtaggtgatctacctttaagactgggacagcctttagaaataaggggtaataccggatgtgcttattatgttttgacgtagtaagggaaggagcgtttgctccgcttagagatgagcctgcgtcccattagctagttggtaaggtaacggcctaccaaggcgatgatgggtatccgacctgagagggtgatcggacacattgggactgagatacggcccaaactcctacgggaggcagcagctgagaatcttccgcaatggacgaaagtctgacggagcgacaccgcgtgaatgatgaaggccgaaaggttgtaaagttcttttgcagacaaagaataaggatagaaggaaatgtctatttgatgacggtagttatgcgaataagccccggctaattacgtgcggggcgagcgttttcggaattattgggcgtaaagggcatgtaggcggtttaagcctgtgtgaatctacgagcttaactcgtaaatgcattgggtactgcttgaatcagaggggaactggaattccaagtgtaggggtggaatctgtagatatttggaagaacaccggtggcgaaggcgggtttctagcatgattgacgctatgcgaaggtgggggagcaaacaggattagataccctggtagtccgcacagtcatgtacactagtgggggtaagactcagtgggcaaacgcataagtgtaccgcctggggagtatgcccgcaaggtgaaactcaaaggaattgacgggggcccacacaagcggtggagcatgtggtttaattcgatgtacgcgaggaaccttacctgggtttgacataaggattatagagatatggtagcgtagatacgctttacaggtgctgcatggctgtcgtcagctcgtgccgtgaggtgttgggtaagtcccgcaacgagcgcaaccctactgccagttactaacaggtaaagtgaggactcggcggaactgccggtgataaaccggaggaaggtggggatgacgtcaagtcatcatggcccttatgtccagggctacacacgtgctacaatggttgttacaaagtgaagcgaagccgcgaggtgagcgaatgcaaaagcaatcgtagtcgattggaatctgaaacctgattcatgaagctggaatcgctagtaatcgctatcagcacgatgcggtgaatacgttcctgggccttgtacacaccgcccgtcacaccatccgagtcgaggtacccaagagctagtctaacgagggacggtggcgaaggtacgtggtaaggagggtgaagtcgtaac

SEQ ID NO: 1958 - DNA, 1405 bp, Treponema sp.
  oral taxon G85
aacgaacgctggcggcgcgtcttaagcatgcaagtcggacggcaagaaggggctcgccccttcctagagtggcggactggtgagtaacgcgtggacgacgcgcccacccgacggggacagccggtagaaataccggataataccggatgatctcttttggaataaaggcgaaagaggaaagcggctccggccgcgcgggtggagcggtccgcgtcctatcagctagtcggcggggtgaaggcctgccgaggcgacgacgggtatccggcctgagagggtggacggacacattgggactgagatacggcccagactcctacgggaggcagcagctaagaatattccgcaatggggggaaccccgacggagcgacgccgcgtggacgacgaaggccggaaggttgtaaagtccttttttccgcgaggaataaggccgggagggaatgcccggccggtgacggtagcggaggaataagcaccggctaattacgtgctaacacgtaaggtgcgagcgttgttcggaattattgggcgtaaagggcatgcaggcggtcgcaagcccggcgtgaaaggggggctaactcccatgcgctgggaactgaggcttgagtttctgaagggagcggaattccacgtgtaggggtgaaatctgtagatatgtggaagaacaccaatggcgaaggcaggtcggcgaagactgacgctgaggtgcgaaggtgcggggagcaaacaggattagatccctggtagtccgcacagtcaacgatgtgcactagatgtctgtccaaggatgggtgtcaaagcaaacgcgataagtgcaccgcctggggagtatgcccgcaagggtgaaactcaaaggaattgacgggggcccgcacaagcggtggagcatgtggtttaattcgatggtacgcgaggaaccttacctgggtttgacatacacagattattagagatattaagcgcagcaatgctctgtgacaggtgctgcatggctgtcgtcagctcgtgccgtgaggtgttgggttaagtcccgcaacgagcgcaacccctactgcagttaccagcgtagggggactctggcggaactgcctgcgacaagcaggaggaaggggggatgacgtcaagtcatcatggcccttatgtccagggcacacacgtgctacaatggttgggacaagcgagcgagtgcgagagtaagcagaacgcagaaaccgatcgtagtccggattggagtctgaaactcgactccatgaagttggaatcgctagtaatcgcaatcagcacgtgcggtgaatacgttcccgggccttgtacacaccgcccgtcacaccatccgagtgggggtacccgaagccggcagtctaaccgcaagggggacgctgtcgaaggtatgcttcgtgagg

SEQ ID NO: 1959 - DNA, 1543 bp, Treponema sp.
  ovine footrot
agagtttgatcatggctcagaacgaacgctggcggcgcgtcttaagcatgcaagtcgaacggcaagagaggagcttgcttctctcctagagtggcggactggtgaggaacacgtgggtaatctacccttaagatggggatagctgctagaaatagcaggtaataccgaatatactcagtgcttcataaggggtattgaggaaaggaagctacggcttcgcttgaggatgagcttgcgtcccattagctagttggtgaggtaaaggcccaccaaggcgacgatgggtatccggcctgagagggtgatcrgacacattgggactgagatacggcccaaactcctacgggaggcagcagctaagaatattccgcaatggacggaagtctgacggagcgacgccgcgtggatgaagaaggctgaaaagttgtaaaatccttttgttgatgaagaataagggtgagagggaatgctcatctgatgacggtaatcgacgaataagccccggctaattacgtgccagcagccgcggtaacacgtaaggggcgagcgttgttcggaattattgggcgtaaagggcatgtaggcggttatgtaagcctgatgtgaaatcctggggcttaaccccagaatagcattgggtactgtgtaacttgaattacggaagggaaactggaattccaagtgtaggggtggaatctgtagatatttggaagaacaccggtggcgaaggcgggtttctggccgataattgacgctgagatgcgaaagtgtggggatcgaacaggattagataccctggtagtccacaccgtaaacgatgtacactaggtgttggggcaagagcttcagtgccaaagcaaacgcgataagtgtaccgcctggggagtatgcccgcaagggtgaaactcaaaggaattgacgggggcccgcacaagcggtggagcatgtggtttaattcgatggtacgcgaggaaccttacctgggtttgacatctagtagaaggtcttagagataaggccgggtagcaataccctgctagacaggtgctgcatggctgtcgtcagctcgtgccgtgaggtgttgggttaagtcccgcaatgagcgcaacccctactgccagttactaacaggtaaagcttgaggactctggcggaactgccgatgacaaatcggaggaaggtggggatgacgtcaagtcatcatggcccttatgtccagggctacacacgtgctacaatggttgctacaaagcgaagcaagaccgtaaggtggagcaagccgcaaaaaagcaatcgtagttcggattgaagtctgaaactcgacttcatgaagttggaatcgctagtaatcgcgcatcagcacggcgcggtgaatacgttcccgggccttgtacacaccgcccgtcacaccatccgagttgggggtacccgaagtcgcttgtctaacctgcaaaggaggacggtgccgaaggtacgcttggtaaggagggtgaagtcgtaacaaggtagccgtaccggaaggtgcggctggatcacctcctta

SEQ ID NO: 1960 - DNA, 1548 bp, Treponema vincentii
tggagagtttgatcctggctcagaacgaacgctggcggcgcgtcttaagcatgcaagtcgaacggcaagagagaagcttgcttctctcctagagtggcggactggtgaggaacacgtgggtaatctacccttaagatggggatagctgctagaaatagcaggtaataccgaatagtctcaatggttcataagaagtattgaggaaaggaagctacggcttcgcttgaggatgagcttgcgtcccattagctagttggtgaggtaaaggcccaccaaggcgacgatgggtatccggcctgagagggtgatcggacacattgggactgagatacggcccaaactcctacgggaggcagcagctaagaatattccgcaatggacggaagtctgacggagcgacgccgcgtggatgaagaaggctgaaaagttgtaaaatccttttgttgatgaagaataagggtgagagggaatgctcatctgatgacggtaatcgacgaataagccccggctaattacgtgccagcagccgcggtaacacgtaaggggcgagcgttgttcggaattattgggcgtaaagggcatgtaggcggttatgtaagcctggtgtgaaatcctggggcttaaccctagaatagcattgggtactgtataacttgaattacggaagggaaactggaattccaagtgtaggggtggaatctgtagatatttggaagaacaccggtggcgaaggcgggtttctggccgataattgacgctgagatgcgaaagtgtggggatcgaacaggattagataccctggtagtccacactgtaaacgatgtacactaggtgttggggcaagagcttcagtgccaaagcaaacgcgataagtgtaccgcctggggagtatgcccgcaagggtgaaactcaaaggaattgacgggggcccgcacaagcggtggagcatgtggtttaattcgatggtacgcgaggaaccttacctgggtttgacatctagtagacagtcttagagataaggcttggtagcaataccctgctagacaggtgctgcatggctgtcgtcagctcgtgccgtgaggtgttgggttaagtcccgcaacgagcgcaacccctactgccagttactaacaggtaaagcttgaggactctggcggaactgccgatgacaaatcggaggaaggtggggatgacgtcaagtcatcatggcccttatgtccagggctacacacgtgctacaatggttgctacaaagcgaagcgagaccgtaaggtggagcaaaccgcaaaaaagcaatcgtagttcggattgaagtctgaaactcgacttcatgaagttggaatcgctagtaatcgcgcatcagcacggcgcggtgaatacgttcccgggccttgtacacaccgcccgtcacaccatccgagttgggggtacccgaagtcgcttgtctaacctgcaaaggaggacggtgccgaaggtacgcttggtgaggagggtgaagtcgtaacaaggtagccgtaccggaaggtgcggctggatcacctcctttct

SEQ ID NO: 1961 - DNA, 1530 bp, Tropheryma whipplei
ttattatggagagtttgatcctggctcaggacgaacgctggcggcgtgcttaacacatgcaagtcgaacggaaatcagggagcttgctccctgtgattagtggcgaacgggtgagtaacacgtgagcaacctgcccctaactttgggataacttcgggaaaccggggctaataccaaatacgacccatgagggcatcctctgtgggtggaaagaatttcggttggggatgggctcgcggcctatcagcttgttggtggggtaacggcctaccaaggcatcgacgggtagccggcctgagagggtgatcggccacactgggactgagacacggcccagactcctacgggaggcagcagtggggaatattgcacaatgggcgcaagcctgatgcagcaacgccgcgtgggggaagaaggccttcgggttgtaaacctcttttggcagggaagaagcgaaagtgacggtacctgcagaaaaagcgccggctaactacgtgccagcagccgcggtaatacgtagggcgcgagcgttgtccggaattattgggcgtaaagagctcgtaggcggtttgtcacgtctgccgtgaaaatccgaggctcaacctcggacctgcggtgggtacgggcaggctagagtgcgataggggagagcggaattcctggtgtagcggtgaaatgcgcagatatcaggaggaacaccgatggcgaaggcagctctctgggtcgctactgacgctgaggagcgaaagcgtggggagcgaacaggattagataccctggtagtccacgccgtaaacgttgggcgctagacgtgggggtggttccaccgcttccgtgtcgcagctaacgcattaagcgccccgcctggggagtacggccgcaaggctaaaactcaagggaattgacgggggcccgcacaagcggcggagcatgcggattaattcaatgcaacgcgaagaaccttaccaaggcttgatatataccggaaaggcgtagagatacgccccccgcaaggtcggtatacaggtggtgcacggttgtcgtcagctcgtgtcgtgagatgttgggttaagtcccgcaacgagcgcaaccctcgtcctgtgttgccagcgcgtaatggcggggactcacaggagactgccggggtcaactcggaggaaggtggggatgacgtcaaatcatcatgcccttcggtcttgggcttcacgcgtgctacaatggctggtacagagggttgcaatatcgcaaggtggagcgaatctcaaaaagccagtctcagttcggattggggtctgcaactcgaccccatgaagtcggagtcgctagtaatcgcagatcagcaatgctgcggtgaatacgttcccgggccttgtacacaccgcccgtcaagtcatgaaagctggtaacacccgaagccggtgacttaaccttttttggagagagccgtcgaaggtgggattggtgattgggactaagtcgtaacaaggtagccgtaccggaaggtgcggctggatcacctcctttctaagg

SEQ ID NO: 1962 - DNA, 1323 bp, Trueperella pyogenes
  modified_base (1119)..(1119): a, c, t, g, unknown or other
  modified_base (1154)..(1154): a, c, t, g, unknown or other
  modified_base (1237)..(1237): a, c, t, g, unknown or other
  modified_base (1276)..(1276): a, c, t, g, unknown or other
  modified_base (1279)..(1279): a, c, t, g, unknown or other
ggcgtgcttaacacatgcaagtcgaacgatgaagccggggctttttgttttggtggattagtggcgaacgggtgagtaatacgtgagtaacctgcccttgtctttgggataagcctgggaaactgggtctaataccggatattctgcttttgccgcatggtgggggttggaaagattttttggatggggatgggctcacggcctatcagcttgttggtggggtgatggcctaccaaggcgtcgacgggtagccggcctgagagggtgaccggccacattgggactgagatacggcccagactcctacgggaggcagcagtggggaatattgcacaatggacgcaagtctgatgcagcgacgccgcgtgggggatgaaggctttcgggttgtaaactcctttcagtacagaagaagcatttttgtgacggtatgtgcagaagaagcgccggctaactacgtgccagcagccgcggtaatacgtagggcgcgagcgttgtccggaattattgggcgtaaagagctcgtaggcggtttgttgcgcctgctgtgaaagaccggggcttaacttcggggttgcagtgggtacgggcagactagagtgtggtaggggtaattggaattcctggtgtagcggtggaatgcgcagatatcaggaggaacaccgatggcgaaggcaggttactgggccattactgacgctgaggagcgaaagcgtgggtagcgaacaggattagataccctggtagtccacgctgtaaacgttgggcactaggtgtggggccttttccacgggttctgcgccgtagctaacgctttaagtgccccgcctggggagtacggccgcaaggttaaaactcaaaggaattgacgggggcccgcacaagcggcggagcatgcggattaattcgatgcaacgcgaagaaccttaccaaggcttgacatacactgcgatgtgccagagatggtgcagccttcggggtggtgtacaggtggtgcatggttgtcgtcagctcgtgtcgtgagatgttgggttaagtcccgcaacgagcgcaacccttgtcctgtgttgccagcatgttgtggtggggactcacgggagactgccggggttaactcgnaggaaggtggggatgacgtcaaatcatcatgcccnttatgtcttgggcttcacgcatgctacaatggccggtacagagggttgcgagcctgtgagggtgagctaatcccttaaagctngtctcagttcggattggggtctgcaactcgaccccatgnagncggagtcgctagtaatcgcagatcagcaacgctgcggtgaatac

SEQ ID NO: 1963 - DNA, 1486 bp, Tsukamurella paurometabola
cctggctcaggacgaacgctggcggcgtgcttaacacatgcaagtcgaacggtaaggccctttcgggggtacacgagtggcgaacgggtgagtaacacgtgggtgacctgccctgtactttgggataagcctgggaaactgggtctaataccggatatgaccttctcctgcatgggggttggtggaaagcttttgcggtacaggatgggcccgcggcctatcagcttgttggtggggtaatggcctaccaaggcgacgacgggtagccggcctgagagggcgaccggccacactgggactgagacacggcccagactcctacgggaggcagcagtggggaatattgcacaatgggcgcaagcctgatgcagcgacgccgcgtgagggatgacggccttcgggttgtaaacctctttcagtagggacgaagcgcaagtgacggtacctacagaagaagcaccggccaactacgtgccagcagccgcggtaatacgtagggtgcaagcgttgtccggaattactgggcgtaaagagctcgtaggcggtttgtcacgtcgtctgtgaaaacccgaggcttaacctcgggcctgcaggcgatacgggcagacttgagtactgtaggggagactggaattcctggtgtagcggtggaatgcgcagatatcaggaggaacaccggtggcgaaggcgggtctctgggcagtaactgacgctgaggagcgaaagcgtgggtagcgaacaggattagataccctggtagtccacgccgtaaacggtgggtactaggtgtgggtttccttccacgggatccgtgccgtagctaacgcattaagtaccccgcctggggagtacggccgcaaggctaaaactcaaaggaattgacgggggcccgcacaagcggcggagcatgtggattaattcgatgcaacgcgaagaaccttacctgggtttgacatatacaccatcgccgcagagatgtggtttgccttgtgccttctatacaggtggtgcatggctgtcgtcagctcgtgtcgtgagatgttgggttaagtcccgcaacgagcgcaacccttgtctcatgttgccagcacgtaatggtggggactcgtgagagactgccggggtcaactcggaggaaggtggggatgacgtcaagtcatcatgccccttatgtccagggcttcacacatgctacaatggcgcgtacagagggctgcgataccgtgaggtggagcgaatcccttaaagcgcgtctcagttcggattggggtctgcaactcgaccccatgaagtcggagtcgctagtaatcgcagatcagcaacgctgcggtgaatacgttcccgggccttgtacacaccgcccgtcacgtcatgaaagtcggtaacacccgaagccggtggcctaacccttgtggagggagctgtcgaaggtgggattggcgattgggacgaagtcgtaacaaggtagccgtaccggaaggtgcgg

SEQ ID NO: 1964 - DNA, 1417 bp, Tsukamurella tyrosinosolvens
ggctcaggacgaacgctggcggcgtgcttaacacatgcaagtcgaacggtaaggccctttcgggggtacacgagtggcgaacgggtgagtaacacgtgggtgacctgccctgtacttcgggataagcctgggaaactgggtctaataccggatatgaccttctcctgcatgggggttggtggaaagtttttgcggtacaggatgggcccgcggcctatcagcttgttggtggggtaatggcctaccaaggcgacgacgggtagccggcctgagagggcgaccggccacactgggactgagacacggcccagactcctacgggaggcagcagtggggaatattgcacaatgggcgaaagcctgatgcagcgacgccgcgtgagggatgacggccttcgggttgtaaacctctttcagtagggacgaagcgcaagtgacggtacctacagaagaagcaccggccaactacgtgccagcagccgcggtaatacgtagggtgcgagcgttgtccggatttactgggcgtaaagagctcgtaggcggtttgtccgtcgtctgtgaaaacccgaggcttaacctcgggcctgcaggcgatacgggcagacttgagtactgtaggggagactggaattcctggtgtagcggtggaatgcgcagatatcaggaggaacaccggtggcgaaggcgggtctctgggcagtaactgacgctgaggagcgaaagcgtgggtagcgaacaggattagataccctggtagtccacgccgtaaacggtgggtactaggtgtgggtttccttccacgggatccgtgccgtagctaacgcattaagtaccccgcctggggagtacggccgcaaggctaaaactcaaaggaattgacgggggcccgcacaagcggcggagcatgtggattaattcgatgcaacgcgaagaaccttacctgggtttgacatatagaggatcgccggagagattcggtttgccttgtgccttctatacaggtggtgcatggctgtcgtcagctcgtgtcgtgagatgttgggttaagtcccgcaacgagcgcaacccttgtctcatgttgccagcacgtaatggtggggactcgtgagagactgccggggtcaactcggaggaaggtggggatgacgtcaagtcatcatgccccttatgtccagggcttcacacatgctacaatggcgcgtacagagggctgcgataccgtgaggtggagcgaatcccttaaagcgcgtctcagttcggattggggtctgcaactcgaccccatgaagtcggagtcgctagtaatcgcagatcagcaacgctgcggtgaatacgttcccgggccttgtacacaccgcccgtcacgtcatgaaagtcggtaacacccgaagccggggcctaaccccttgtgggaggga

SEQ ID NO: 1965 - DNA, 1371 bp, Turicibacter sanguinis
  modified_base (50)..(50): a, c, t, g, unknown or other
tcgagcgaaccacttcggtggtgagcggcgaacgggtgagtaacacgtangttatctgcccatcagacggggacaacgattggaaacgatcgctaataccggataggacgaaagtttaaaggtgcttcggcaccactgatggatgagcctgcggcgcattagctagttggtagggtaaaggcctaccaaggcgacgatgcgtagccgacctgagagggtgaacggccacactgggactgagacacggcccagactcctacgggaggcagcagtagggaatcttcggcaatgggcgaaagcctgaccgagcaacgccgcgtgaatgatgaaggccttcgggttgtaaaattctgttataagggaagaatggctctagtaggaaatggctagagtgtgacggtaccttatgagaaagccacggctaactacgtgccagcagccgcggtaatacgtaggtggcgagcgttatccggaattattgggcgtaaagagcgcgcaggtggttgattaagtctgatgtgaaagcccacggcttaaccgtggagggtcattggaaactggtcaacttgagtgcagaagagggaagtggaattccatgtgtagcggtgaaatgcgtagagatatggaggaacaccagtggcgaaggcggcttcctggtctgtaactgacactgaggcgcgaaagcgtggggagcaaacaggattagataccctggtagtccacgccgtaaacgatgagtgctaagtgttgggggtcgaacctcagtgctgaagttaacgcattaagcactccgcctggggagtacggtcgcaagactgaaactcaaaggaattgacggggacccgcacaagcggtggagcatgtggtttaattcgaagcaacgcgaagaaccttaccaggtcttgacataccagtgaccgtcctagagataggattttcccttcggggacaatggatacaggtggtgcatggttgtcgtcagctcgtgtcgtgagatgttgggttaagtcccgcaacgagcgcaacccctgtcgttagttgccagcattcagttggggactctaacgagactgccagtgacaaactggaggaaggtggggatgacgtcaaatcatcatgccccttatgacctgggctacacacgtgctacaatggttggtacaaagagaagcgaagcggtgacgtggagcaaacctcataaagccaatctcagttcggattgtaggctgcaactcgcctacatgaagttggaatcgctagtaatcgcgaatcagcatgtcgcggtgaatacgttcccgggtcttgtacacaccgcccgtcacaccacgagagtttacaacacccgaagtcagtggcctaaccgcaaggagg

SEQ ID NO: 1966 - DNA, 1561 bp, Ureaplasma parvum
tgttctttgaaaactaaatagaatccgtcaattttaaagagtttgatcctggctcaggattaacgctggcggcatgcctaatacatgcaaatcgaacgaagccttttaggcttagtggtgaacgggtgagtaacacgtatccaatctacccttaagttggggataactagtcgaaagattagctaataccgaataataacatcaatatcgcatgagaagatgtagaaagtcgctctttgtggcgacgcttttggatgagggtgcgacgtatcagatagttggtgaggtaatggctcaccaagtcaatgacgcgtagctgtactgagaggtagaacagccacaatgggactgagacacggcccatactcctacgggaggcagcagtagggaatttttcacaatgggcgcaagccttatgaagcaatgccgcgtgaacgatgaaggtcttatagattgtaaagttcttttatatgggaagaaacgctaaaataggaaatgattttagtttgactgtaccatttgaataagtatcggctaactatgtgccagcagccgcggtaatacataggatgcaagcgttatccggatttactgggcgtaaaacgagcgcaggcgggtttgtaagtttggtattaaatctagatgcttaacgtctagctgtatcaaaaactgtaaacctagagtgtagtagggagttggggaactccatgtggagcggtaaaatgcgtagatatatggaagaacaccggtggcgaaggcgccaacttggactatcactgacgcttaggctcgaaagtgtggggagcaaataggattagataccctagtagtccacaccgtaaacgatcatcattaaatgtcggcccgaatgggtcggtgttgtagctaacgcattaaatgatgtgcctgggtagtacattcgcaagaatgaaactcaaacggaattgacggggacccgcacaagtggtggagcatgttgcttaatttgacaatacacgtagaaccttacctaggtttgacatctattgcgatgctatagaaatatagttgaggttaacaatatgacaggtggtgcatggttgtcgtcagctcgtgtcgtgagatgttgggttaagtcccgcaacgagcgcaacccctttcgttagttacttttctagcgatactgctaccgcaaggtagaggaaggtggggatgacgtcaaatcatcatgccccttatatctagggctgcaaacgtgctacaatggctaatacaaactgctgcaaaatcgtaagatgaagcgaaacagaaaaagttagtctcagttcggatagagggctgcaattcgtcctcttgaagttggaatcactagtaatcgcgaatcagacatgtcgcggtgaatacgttctcgggtcttgtacacaccgcccgtcaaactatgggagctggtaatatctaaaaccgcaaagctaaccttttggaggcatgcgtctagggtaggatcggtgactggagttaagtcgtaacaaggtatccctacgagaacgtggggatggatcacctcctttcttcggagtaaatt

SEQ ID NO: 1967 - DNA, 1517 bp, Ureaplasma urealyticum
caattttaaagagtttgatcctggctcaggattaacgctggcggcatgcctaatacatgcaaatcgaacgaagccttttaggcttagtggtgaacgggtgagtaacacgtatccaacctacccttaagttggggataactagtcgaaagattagctaataccgaataataacatcaatatcgcatgagaagatgtagaaagtcgcgtttgcgacgcttttggatgggggtgcgacgtatcagatagttggtgaggtaatggctcaccaagtcaatgacgcgtagctgtactgagaggtagaacagccacaatgggactgagacacggcccatactcctacgggaggcagcagtagggaatttttcacaatgggcgcaagccttatgaagcaatgccgcgtgaacgatgaaggtcttatagattgtaaagttcttttatatgggaagaaacgctaagataggaaatgattttagtttgactgtaccatttgaataagtatcggctaactatgtgccagcagccgcggtaatacataggatgcaagcgttatccggatttactgggcgtaaaacgagcgcaggcgggtttgtaagtttggtattaaatctagatgcttaacgtctagctgtatcaaaaactgtaaacctagagtgtagtagggagttggggaactccatgtggagcggtaaaatgcgtagatatatggaagaacaccggtggcgaaggcgccaacttggactatcactgacgcttaggctcgaaagtgtggggagcaaataggattagataccctagtagtccacaccgtaaacgatcatcattaaatgtcggctcgaacgagtcggtgttgtagctaacgcattaaatgatgtgcctgggtagtacattcgcaagaatgaaactcaaacggaattgacggggacccgcacaagtggtggagcatgttgcttaatttgacaatacacgtagaaccttacctaggtttgacatctattgcgacgctatagaaatatagttgaggttaacaatatgacaggtggtgcatggttgtcgtcagctcgtgtcgtgagatgttgggttaagtcccgcaacgagcgcaacccctttcgttagttgcttttctagcgatactgctaccgcaaggtagaggaaggtggggatgacgtcaaatcatcatgccccttatatctagggctgcaaacgtgctacaatggctaatacaaactgctgcaaaatcgtaagatgaagcgaaacagaaaaagttagtctcagttcggatagagggctgcaattcgccctcttgaagttggaatcactagtaatcgcgaatcagacatgtcgcggtgaatacgttctcgggtcttgtacacaccgcccgtcaaactatgggagctggtaatatctaaaaccgcaaagctaaccttttggaggcatgcgtctagggtaggatcggtgactggagttaagtcgtaacaaggtatccctacgagaacgtggggatggatcacctcctttct

SEQ ID NO: 1968 - DNA, 958 bp, Ureibacillus composti
  modified_base (15)..(15): a, c, t, g, unknown or other
  modified_base (90)..(90): a, c, t, g, unknown or other
  modified_base (97)..(97): a, c, t, g, unknown or other
  modified_base (170)..(170): a, c, t, g, unknown or other
acggctaactacgtnccagcagccgcggtaatacgtaggtggcaagcgttgtccggaattattgggcgtaaagcgcgcgcaggcggtctnttaagtntgatgtgaaagcccccggctcaaccggggagggtcattggaaactgggagacttgagtgcaggagagggaagnggaattccatgtgtagcggtgaaatgcgtagagatatggaggaacaccagtggcgaaggcggcttcctggcctgtaactgacgctgaggcgcgaaagcgtggggagcaaacaggattagataccctggtagtccacgccgtaaacgatgagtgctaggtgttagggggtttccgccccttagtgctgcagctaacgcattaagcactccgcctggggagtacggtcgcaagactgaaactcaaaggaattgacgggggcccgcacaagcggtggagcatgtggtttaattcgaagcaacgcgaagaaccttaccaggtcttgacatcccgctgaccgccatggagacatggctttcccttcggggacagcggtgacaggtggtgcatggttgtcgtcagctcgtgtcgtgagatgttgggttaagtcccgcaacgagcgcaacccttgtccttagttgccatcattcagttgggcactctaaggagactgccgtacaaatacggaggaaggtggggatgacgtcaaatcatcatgccccttatgacctgggctacacacgtgctacaatgggtggtacaaagggcagcaaacccgcgagggggagcgaatcccaaaaagccactctcagttcggattgcaggctgcaactcgcctgcatgaagccggaatcgctagtaatcgcggatcagcatgccgcggtgaatacgttcccgggccttgtacacaccgcccgtcacaccacgagagtctgtaacacccgaagtcggtgaggtaaccctccgggagc

SEQ ID NO: 1969 - DNA, 1405 bp, Ureibacillus suwonensis
  modified_base (9)..(10): a, c, t, g, unknown or other
gcggaccannttagaaagcttgctttttagattggttagcggcggacgggtgagtaacacgtgggtaacctgccctatagaccgggataactcgcggaaacgcgtgctaataccggataacacaccgaagcgcatgcttcggggttgaaagatggttctgctatcactataggatgggcccgcggcgcattagctagttggtggggtaacggcctaccaaggcgacgatgcgtagccgacctgagagggtgatcggccacactgggactgagacacggcccagactcctacgggaggcagcagtagggaatcttccacaatgggcgaaagcctgatggagcaacgccgcgtgagcgaagaaggtcttcggatcgtaaagctctgttgtaagggaagaacaagcgcagcagtcactggctgcgccctgacggtaccttactagaaagccacggctaactacgtgccagcagccgcggtaatacgtaggtggcaagcgttgtccggaattattgggcgtaaagcgcgcgcaggcggtctcttaagtctgatgtgaaagcccccggctcaaccggggagggtcattggaaactgggagacttgagtgcaggagagggaagggaattccatgtgtagcggtgaaatgcgtagagatatggaggaacaccagtggcgaaggcggcttcctggcctgtaactgacgctgaggcgcgaaagcgtggggagcaaacaggattagataccctggtagtccacgccgtaaacgatgagtgctaggtgttagggggtttccgccccttagtgctgcagctaacgcattaagcactccgcctggggagtacggtcgcaagactgaaactcaaaggaattgacgggggcccgcacaagcggtggagcatgtggtttaattcgaagcaacgcgaagaaccttaccaggtcttgacatcccgctgaccgccatggacacatggcgttcccatgggggacagcggtgacaggtggtgcatggttgtcgtcagctcgtgtcgtgagatgttgggttaagtcccgcaacgagcgcaacccttgtccttagttgccatcattcagttgggcactctaaggagactgccgtacaaatacggaggaaggtggggatgacgtcaaatcatcatgccccttatgacctgggctacacacgtgctacaatgggtggtacaaagggcagcaaacccgcgagggggagcgaatcccaaaaagccactctcagttcggattgcaggctgcaactcgcctgcatgaagccggaatcgctagtaatcgcggatcagcatgccgcggtgaatacgttcccgggccttgtacacaccgcccgtcacaccacgagagtctgtaacacccgaagtcggtgaggtaaccctccgggagc

SEQ ID NO: 1970 - DNA, 1489 bp, Ureibacillus terrenus
  modified_base (382)..(382): a, c, t, g, unknown or other
tggcggcgtgcctaatacatgcaagtcgagcggacctcataggaagcttgctttttatgaggttagcggcggacgggtgagtaacacgtgggtaacctgccctatagaccgggataactcgcggaaacgcgtgctaataccggataacacagcggagcgcatgctccggtgttgaaaggtggttctgctaccgctataggatgggcccgcggcgcattagctagttggtggggtaacggcctaccaaggcgacgatgcgtagccgacctgagagggtgatcggccacactgggactgagacacggcccagactcctacgggaggcagcagtagggaatcttccacaatgggcgaaagcctgatggagcaacgccgcgtgagngaagaaggtcttcggatcgtaaagctctgttgtaagggaagaacaagtgcggtagtaactgaccgcaccctgacggtaccttacgagaaagccacggctaactacgtgccagcagccgcggtaatacgtaggtggcgagcgttgtccggaattattgggcgtaaagcgcgcgcaggcggtctcttaagtctgatgtgaaagcccccggctcaaccggggagggtcattggaaactgggagacttgagtgcaggagagggaagcggaattccatgtgtagcggtgaaatgcgtagagatatggaggaacaccagtggcgaaggcggcttcctggcctgtaactgacgctgaagcgcgaaagcgtggggaccaaacaggattagataccctggtagtccacgccgtaaacgatgagtgctaagtgttagggggcttgccccttagtgctgcagctaacgcattaagcactccgcctggggagtacggtcgcaagactgaaactcaaaggaattgacgggggcccgcacaagcggtggagcatgtggtttaattcgaagcaacgcgaagaaccttaccaggtcttgacatcccgctgaccgccatggagacatggccttcccttcggggacagcggtgacaggtggtgcatggttgtcgtcagctcgtgtcgtgagatgttgggttaagtcccgcaacgagcgcaacccttgtccttagttgccatcattcagttgggcactctaaggagactgccgtacaaatacggaggaaggtggggatgacgtcaaatcatcatgccccttatgacctgggctacacacgtgctacaatgggcggtacaaagggctgcgaacccgcgagggggagcgaatcccaaaaagccgctctcagttcggattgcaggctgcaactcgcctgcatgaagccggaatcgctagtaatcgcggatcagcatgccgcggtgaatacgttcccgggccttgtacacaccgcccgtcacaccacgagagtctgtaacacccgaagtcggtgaggtaacccttccgggagccagccgccgaaggtgggacagatgattggggtgaagtcgtaacaaggtagccgtatc

SEQ ID NO: 1971 - DNA, 1402 bp, Ureibacillus thermophilus
  modified_base (30)..(30): a, c, t, g, unknown or other
  modified_base (1393)..(1393): a, c, t, g, unknown or other
cggaccaattaagaagcttgctttttgatntggttagcggcggacgggtgagtaacacgtgggtaacctgccctatagactgggataactcgcggaaacgtgagctaataccggataacacatcaaagtgcatgctttgatgttgaaagatggttctgctatcactataggatgggcccgcggcgcattagctagttggtggggtaacggcctaccaaggcgacgatgcgtagccgacctgagagggtgatcggccacactgggactgagacacggcccagactcctacgggaggcagcagtagggaatcttccacaatgggcgaaagcctgatggagcaacgccgcgtgagcgaagaaggtcttcggatcgtaaagctctgttgtaagggaagaacaagcgcagcagtaactggctgcgccctgacggtaccttactagaaagccacggctaatacgtgccagcagccgcggtaatagtaggtggcaagcgttgtccggaattattgggcgtaaagcgcgcgcaggcggtttcttaagtctgatgtgaaagcccccggctcaaccggggagggtcattggaaactgggagacttgagtgcaggagagggaagtggaattccatgtgtagcggtgaaatgcgtagagatatggaggaacaccagtggcgaaggcggcttcctggcctgtaactgacgctgaggcgcgaaagcgtggggagcaaacaggattagatacctggtagtccacgccgtaaacgatgagtgctaggtgttagggggtttccaccccttagtgctgcagctaacgcattaagcactccgcctggggagtacgtcgcaagactgaaactcaaaggaattgacgggggcccgcacaagcggtggagcatgtggtttaattcgaagcaacgcgaagaaccttaccaggtcttgacatcccgctgaccgccatggagacatggctttcccttcggggacagcggtgacaggtggtgcatggttgtcgtcagctcgtgtcgtgagatgttgggttaagtcccgcaacgagcgcaacccttgtccttagttgccatcattcagttgggcactctaaggagactgccgtacaaatacggaggaaggtggggatgacgtcaaatcatcatgccccttatgacctgggctacacacgtgctacaatgggcagtacaaagggctgcgaacccgcgagggggagcgaatcccaaaaagctgctctcagttcggattgcaggctgcaactcgcctgcatgaagccggaatcgctagtaatcgcagatcagcatgctgcggtgaatacgttcccgggccttgtacacaccgcccgtcacaccacgagagtctgtaacacccgaagtcggtggggtaaccctncgggagcca

SEQ ID NO: 1972 - DNA, 1540 bp, Ureibacillus thermosphaericus
tagagtttgatcatggctcaggacgaacgctggcggcgtgcctaatacatgcaagtcgagcgaaccaattgaaagcctagctttcatgaggttagcggcggacgggtgagtaacacgtgggtaacctgccctatagactgggataactcgcggaaacgcgtgctaataccggataacacatcaaagtgcatgctttgatgttgaaagatggttctgctatcactataggatgggcccgcggcgcattagcttgttggtggggtaacggcctaccaaggcgacgatgcgtagccgacctgagagggtgatcggccacactgggactgagacacggcccagactcctacgggaggcagcagtagggaatcttccacaatgggcgaaagcctgatggagcaacgccgcgtgagcgaagaaggtcttcggatcgtaaagctctgttgtaagggaagaacaagtgcagtagtaactggctgcaccttgacggtaccttactagaaagccacggctaactacgtgccagcagccgcggtaatacgtaggtggcaagcgttgtccggaattattgggcgtaaagcgcgcgcaggcggtctcttaagtctgatgtgaaagcccccggcttaaccggggagggtcattggaaactgggagacttgagtgcaggagagggaagcggaattccatgtgtagcggtgaaatgcgtagagatatggaggaacaccagtggcgaaggcggcttcctggcctgtaactgacgctgaggcgcgaaagcgtggggagcaaacaggattagataccctggtagtccacgccgtaaacgatgagtgctaagtgttagggggtttccaccccttagtgctgcagctaacgcattaagcactccgcctggggagtacggtcgcaagactgaaactcaaaggaattgacgggggcccgcacaagcggtggagcatgtggtttaattcgaagcaacgcgaagaaccttaccaggtcttgacatcccgctgaccgctatggagacatagccttcccttcggggacagcggtgacaggtggtgcatggttgtcgtcagctcgtgtcgtgagatgttgggttaagtcccgcaacgagcgcaacccttgtccttagttgccatcattcagttgggcactctaaggagactgccgtacaaatacggaggaaggtggggatgacgtcaaatcatcatgccccttatgacctgggctacacacgtgctacaatggacggtacaaacggtcgcgaagtcgcgagacggagccaatccgaaaaaaccgttctcagttcggattgcaggctgcaactcgcctgcatgaagccggaatcgctagtaatcgcggatcagcatgccgcggtgaatacgttcccgggccttgtacacaccgcccgtcacaccacgagagtctgtaacacccgaagtcggtgaggtaaccctttcgggagccagccgccgaaggtgggacagatgattggggtgaagtcgtaacaaggtagccgtatcggaaggtgcggctggatcac

SEQ ID NO: 1973 - DNA, 1469 bp, Vagococcus fluvialis
acgaacgctggcggcgtgcctaatacatgcaagtcgaacgctttgattttcaccggagcttgctccaccgaaaatcaaagagtggcggacgggtgagtaacacgtgggcaacctgcccaacagagggggataacacttggaaacaggtgctaataccgcataatttgttttcccgcatgggagaataataaaagacgcttcggtgtcactgttggatgggcccgcgctgcattagttagttggtggggtaatggcctaccaagaccgtgatgcatagccgacctgagagggtgatcggccacactgggactgagacacggcccagactcctacgggaggcagcagtagggaatcttcggcaatggacgaaagtctgaccgagcaacgccgcgtgagtgaagaaggttttcggatcgtaaaactctgttgttagagaagaacaagtgggagagtaactgttcccaccttgacggtatctaaccagaaagccacggctaactacgtgccagcagccgcggtaatacgtaggtggcaagcgttgtccggatttattgggcgtaaagcgagcgcaggcggtttcttaagtctgatgtgaaagccctcggctcaaccgaggaaggtcattggaaactggggaacttgaatgcagaagaggagagtggaattccatgtgtagcggtgaaatgcgtagatatatggaggaacaccagtggcgaaggcgactctctggtctgtaattgacgctgaggctcgaaagcgtggggagcaaacaggattagataccctggtagtccacgccgtaaacgatgagtgctaagtgttggagggtttccgcccttcagtgctgcagttaacgcattaagcactccgcctggggagtacggccgcaaggctgaaactcaaaggaattgacgggggcccgcacaagcggtggagcatgtggtttaattcgaagcaacgcgaagaaccttaccaggtcttgacatcctttgaccactctagagatagagctttcccttcggggacaaagtgacaggtggtgcatggttgtcgtcagctcgtgtcgtgagatgttgggttaagtcccgcaacgagcgcaacccttattgttagttgccatcattcagttgggcactctagcgagactgccggtgacaaaccggaggaaggtggggatgacgtcaaatcatcatgccccttatgacctgggctacacacgtgctacaatggacggtacaatgagtcgcgagaccgcgaggtttagctaatctcttaaagccgttctcagttcggattgtaggctgcaactcgcctacatgaagccggaatcgctagtaatcgtggatcagcacgccacggtgaatacgttcccgggccttgtacacaccgcccgtcacaccacgagagtttgtaacacccaaagtcggtgaggtaaccttttggagccagccgcctaaggtgggatagat

SEQ ID NO: 1974 - DNA, 1389 bp, Veillonella atypica
  modified_base (530)..(530): a, c, t, g, unknown or other
gcgatggaagcttgcttctatcaatcttagtggcgaacgggtgagtaacgcgtaatcaacctgcccttcagagggggacaacagttggaaacgactgctaataccgcatacgatccaatctcggcatcgagactggatgaaaggtggcctctatttataagctatcactgaaggaggggattgcgtctgattagctagttggaggggtaacggcccaccaaggcgatgatcagtagccggtctgagaggatgaacggccacattgggactgagacacggcccagactcctacgggaggcagcagtggggaatcttccgcaatggacgaaagtctgacggagcaacgccgcgtgagtgatgacggccttcgggttgtaaagctctgttaatcgggacgaatggttcttgtgcgaatagtgcgaggatttgacggtaccggaatagaaagccacggctaactacgtgccagcagccgcggtaatagtaggtggcaagcgttgtccggaattattgggcgtaagcgcgcaggngagtctgtcttaaaagttcggggcttaaccccgtgatgggatggaaactgcgatctagagtatcggagaggaaagtggaattcctagtgtagcggtgaaatgcgtagatattaggaagaacaccagtggcgaaggcgactttctggacgaaaactgacgctgaggcgcgaaagccaggggagcgaacgggattagataccccggtagtcctggccgtaaacgatgggtactagtgtagaggtatcgaccccttctgtgccggagttaacgcaataagtaccccgcctggggagtacgaccgcaaggttgaaactcaaaggaattgagggggcccgcacaagcggtggagtatgtggtttaattcgacgcaacgcgaagaacttaccaggtctgacattgatggacagaactagagatagttcttcttcttcggaagccagaaaacaggtggtgcacggttgtcgtcagctcgtgtcgtgagatgttgggttaagtcccgcaacgagcgcaacccctatcttatgttgccagcacttcgggtgggaactcatgagagactgccgcagacaatgcggaggaaggcggggatgacgtcaaatcatcatgccccttatgacctgggctacacacgtactacaatgggagttaatagacggaagcgaaaccgcgaggtggagcaaacccgagaaacactctctcagttcggatcgtaggctgcaactcgcctacgtgaagtcggaatcgctagtaatcgcaggtcagcatactgcggtgaatacgttcccgggccttgtacacaccgcccgtcacaccacgaaagtcggaagtgcccaaagccggtggggtaaccttcgggagc

SEQ ID NO: 1975 - DNA, 1005 bp, Veillonella dispar
  modified_base (820)..(820): a, c, t, g, unknown or other
  modified_base (855)..(855): a, c, t, g, unknown or other
  modified_base (938)..(938): a, c, t, g, unknown or other
  modified_base (992)..(992): a, c, t, g, unknown or other
tcgaacgaagagcgatggaagcttgcttctatcaatcttagtggcgaacgggtgagtaacgcgtaatcaacctgcccttcagagggggacaacagttggaaacgactgctaataccgcatacgatctaacctcggcatcgaggatggatgaaaggtggcctctatttataagctatcactgaaggaggggattgcgtctgattagctagttggaggggtaacggcccaccaaggcgatgatcagtagccggtctgagaggatgaacggccacattgggactgagacacggcccagactcctacgggaggcagcagtggggaatcttccgcaatggacgaaagtctgacggagcaacgccgcgtgagtgatgacggccttcgggttgtaaagctctgttaatcgggacgaaaggccttcttgcgaatagttagaaggattgacggtaccggaatagaaagccacggctaactacgtgccagcagccgcggtaatacgtaggtggcaagcgttgtccggaattattgggcgtaaagcgcgcgcaggcggattggtcagtctgtcttaaaagttcggggcttaaccccgtgatgggatggaaactgccaatctagagtatcggagaggaaagtggaattcctagtgtagcggtgaaatgcgtagatattaggaagaacaccagtggcgaaggcgactttctggacgaaaactgacgctgaggcgcgaaagccaggggagcgaacgggattagataccccggtagtcctggccgtaaacgatgggtactaggtgtaggaggtatcgaccccttctgtgccgganttaacgcaataagtaccccgcctggggagtacgancgcaaggttgaaactcaaaggaattgacgggggcccgcacaagcggtggagtatgtggtttaattcgacgcaacgcgaagaancttaccaggtcttgacattgatggacagaactagagatagttcctcttcttcgnaagccagaaaaca

SEQ ID NO: 1976 - DNA, 1296 bp, Veillonella sp.
  P1 oral clone MB5_P17
gacgaacgctggcggcgtgcttaacacatgcaagtcgaacgagtggcgaacgggtgagtaacgcgtaatcaacctgcccttcagagggggacaacagttggaaacgactgctaataccgcatacggaaagtcactgaaggaggggattgcgtctgattagctagttggaggggtaacggcccaccaaggcgatgatcagtagccggtctgagaggatgaacggccacattgggactgagacacggcccagactcctacgggaggcagcagttgggaatcttccgcaatggacgaaagtctgacggagcaacgccgcgtgagtgatgacggccttcgggttgtaaagctctgttaatcgggacgatgacggtaccggaatagaaagccacggctaactacgtgccagcagccgcggtaatacgtaggtggcaagcgttgtccggaattattgggcgtaaagcgcgcgcaggcggattggtcagtctgtcttaaaagttcggggcttaaccccgtgatgggatggaaactgccaatctagagtatcggagaggaaagtggaattcctagtgtagcggtgaaatgcgtagatattaggaagaacaccagtggcgaaggcgactttctggacgaactgacgctgaggcgcgaaagccaggggagcgaacgggattagataccccggtagtcctggccgtaaacgatgggtactaggtgtaggagcttctatgccggagttaacgcaataagtaccccgcctggggagtacgaccgcaaggttgaaactcaaaggaattgacgggggcccgcacaagcggtggagtatgtggtttaattcgacgcaacgcgaagaaccttaccaggtcttgacattaacaggtggtgcacggttgtcgtcagctcgtgtcgtgagatgttgggttaagtcccgcaacgagcgcaacccctatcttatgttgccagcacgtgggaactcatgagagactgccgcagacaatgcggaggaaggcggggatgacgtcaaatcatcatgccccttatgacctgggctacacacgtactacaatgggagttagacggaagcgaaaccgcgaggtggagcagacccgagactctctcagttcggatgtaggctgcaactcgcctacggaagtcggaatcgctagtaatcgcaggtcagcatactgcggtgaatacgttcccgggccttgtacacaccgcccgtcacaccacgaaagtcggaagtgcccaaagccggtgggtagccagccgtctaaggtaaagtcgatgattggggtg

SEQ ID NO: 1977 - DNA, 1409 bp, Veillonella montpellierensis
gagcacgggagcttgctcctatgaatcttagtggcgaacgggtgagtaacgcgtaatcaacctgccctacaatgggggacaacagttggaaacgactgctaataccgcatacgacctacggttggcatcaatcgtaggtgaaaggtggcctctacatgtaagctatcgttgtaggaggggattgcgtctgattagctagttggaggggtaacggcccaccaaggcgatgatcagtagccggtctgagaggatgaacggccacattgggactgagacacggcccaaactcctacgggaggcagcagtggggaatcttccgcaatggacgaaagtctgacggagcaacgccgcgtgagtgatgacggtcttcggattgtaaagctctgttaatcgggacgaatggtttgtgtgcaaatagtgcatagacatgacggtaccggaatagaaagccacggctaactacgtgccagcagccgcggtaatacgtaggtggcaagcgttgtccggaattattgggcgtaaagcgcgcgcaggcggactagccagtcagtcttaaaagttcggggcttaaccccgtgatgggattgaaactactagtctagagtatcggagaggaaagtggaattcctagtgtagcggtgaaatgcgtagatattaggaagaacaccagtggcgaaggcgactttctggacgaacactgacgctgaggcgcgaaagccaggggagcgaacgggattagataccccggtagtcctggccgtaaacgatgggtactaagtgtgggaggtatcgaccccttccgtgctgcagttaacgcaataagtaccccgcctggggagtacggtcgcaagactgaaactcaaaggaattgacgggggcccgcacaagcggtggagtatgtggtttaattcgacgcaacgcgaagaaccttaccaggtcttgacattgatggacagaactagagatagtttttcttcttcggaagccagaaaacaggtggtgcacggttgtcgtcagctcgtgtcgtgagatgttgggttaagtcccgcaacgagcgcaacccctatcttatgttgccagcacgtaatggtgggaactcatgagagactgccgcagacaatgcggaggaaggcggggatgacgtcaaatcatcatgccccttatgacctgggctacacacgtactacaatgggagttaataaagagaagcgaaaccgcgaggtggagcgaacctcacaaacactctctcagttcggattgcaggctgcaactcgcctgcatgaagtcggaatcgctagtaatcgcaggtcagcatactgcggtgaatacgttcccgggccttgtacacaccgcccgtcacaccacgaaagtcggaagtacccaaagccggtggggtaaccttcgggagc

SEQ ID NO: 1978 - DNA, 1564 bp, Veillonella parvula
ttggagagtttgatcctggctcaggacgaacgctggcggcgtgcttaacacatgcaagtcgaacgaagagcgatggaagcttgcttctatcaatcttagtggcgaacgggtgagtaacgcgtaatcaacctgcccttcagagggggacaacagttggaaacgactgctaataccgcatacgatctaatctcggcatcgaggatagatgaaaggtggcctctacatgtaagctatcactgaaggaggggattgcgtctgattagctagttggaggggtaacggcccaccaaggcgatgatcagtagccggtctgagaggatgaacggccacattgggactgagacacggcccagactcctacgggaggcagcagtggggaatcttccgcaatggacgaaagtctgacggagcaacgccgcgtgagtgatgacggccttcgggttgtaaagctctgttaatcgggacgaaaggccttcttgcgaatagtgagaaggattgacggtaccggaatagaaagccacggctaactacgtgccagcagccgcggtaatacgtaggtggcaagcgttgtccggaattattgggcgtaaagcgcgcgcaggcggatcaggtcagtctgtcttaaaagttcggggcttaaccccgtgatgggatggaaactgccaatctagagtatcggagaggaaagtggaattcctagtgtagcggtgaaatgcgtagatattaggaagaacaccagtggcgaaggcgactttctggacgaaaactgacgctgaggcgcgaaagccaggggagcgaacgggattagataccccggtagtcctggccgtaaacgatgggtactaggtgtaggaggtatcgaccccttctgtgccggagttaacgcaataagtaccccgcctggggagtacgaccgcaaggttgaaactcaaaggaattgacgggggcccgcacaagcggtggagtatgtggtttaattcgacgcaacgcgaagaaccttaccaggtcttgacattgatggacagaaccagagatggttcctcttcttcggaagccagaaaacaggtggtgcacggttgtcgtcagctcgtgtcgtgagatgttgggttaagtcccgcaacgagcgcaacccctatcttatgttgccagcactttgggtggggaactcatgagagactgccgcagacaatgcggaggaaggcggggatgacgtcaaatcatcatgccccttatgacctgggctacacacgtactacaatgggagttaatagacggaagcgagatcgcgagatggagcaaacccgagaaacactctctcagttcggatcgtaggctgcaactcgcctacgtgaagtcggaatcgctagtaatcgcaggtcagcatactgcggtgaatacgttcccgggccttgtacacaccgcccgtcacaccacgaaagtcggaagtgcccaaagccggtggggtaaccttcgggagccagccgtctaaggtaaagtcgatgattggggtgaagtcgtaacaaggtagccgtatcggaaggtgcggctggatcacctcctttct

SEQ ID NO: 1979 - DNA, 1000 bp, Veillonella sp.
  3_1_44
  modified_base (992)..(994): a, c, t, g, unknown or other
tcgaacgaagagcgatggaagcttgcttctatcaatcttagtggcgaacgggtgagtaacgcgtaatcaacctgcccttcagagggggacaacagttggaaacgactgctaataccgcatacgatctaatctcggcatcgaggatagatgaaaggtggcctctacatgtaagctatcactgaaggaggggattgcgtctgattagctagttggaggggtaacggcccaccaaggcgatgatcagtagccggtctgagaggatgaacggccacattgggactgagacacggcccagactcctacgggaggcagcagtggggaatcttccgcaatggacgaaagtctgacggagcaacgccgcgtgagtgatgacggccttcgggttgtaaagctctgttaatcgggacgaaaggccttcttgcgaatagtgagaaggattgacggtaccggaatagaaagccacggctaactacgtgccagcagccgcggtaatacgtaggtggcaagcgttgtccggaattattgggcgtaaagcgcgcgcaggcggataggtcagtctgtcttaaaagttcggggcttaaccccgtgatgggatggaaactgccaatctagagtatcggagaggaaagtggaattcctagtgtagcggtgaaatgcgtagatattaggaagaacaccagtggcgaaggcgactttctggacgaaaactgacgctgaggcgcgaaagccaggggagcgaacgggattagataccccggtagtcctggccgtaaacgatgggtactaggtgtaggaggtatcgaccccttctgtgccggagttaacgcaataagtaccccgcctggggagtacgaccgcaaggttgaaactcaaaggaattgacgggggcccgcacaagcggtggagtatgtggtttaattcgacgcaacgcgaagaacccttaccaggtcttgacattgatggacagaactagagatagttcctcttcttcnnnagccag

SEQ ID NO: 1980 - DNA, 1354 bp, Veillonella sp.
  6_1_27
agcgatggaagcttgcttctatcaatcttagtggcgaacgggtgagtaacgcgtaatcaacctgcccttcagagggggacaacagttggaaacgactgctaataccgcatacgatctaacctcggcatcgaggaaagatgaaaggtggcctctatttataagctatcactgaaggaggggattgcgtctgattagctagttggaggggtaacggcccaccaaggcgatgatcagtagccggtctgagaggatgaacggccacattgggactgagacacggcccagactcctacgggaggcagcagtggggaatcttccgcaatggacgaaagtctgacggagcaacgccgcgtgagtgatgacggccttcgggttgtaaagctctgttaatcgggacgaaaggccttcttgcgaacagttagaaggattgacggtaccggaatagaaagccacggctaactacgtgccagcagccgcggtaatagtaggtggcaagcgttgtccggaattattgggcgtaaagcgcgcgcaggcggatcagtagtctgtttaaaagttcggggcttaaccccgtgatgggatggaaactgctgatctagagtatcggagaggaaagtggaattcctagtgtagcggtgaaatgcgtagatattaggaagaacaccagtggcgaaggcgactttctggacgaaaactgacgtgaggcgcgaaagccaggggagcgaacgggattagataccccggtagtcctggccgtaaacgatgggtactaggtgtaggaggtatcgaccccttctgtgccggagttaacgcaataagtaccccgcctggggagtacgaccgcaaggttgaaactcaagatagggggcccgccaggggaggttatgaggaaactacaggttgacttcgcggtacagaaccagagatggttcttcttcttcggaagccagaaaacaggtggtgcacggttgtcgtcagctcgtgtcgtgagatgttgggttaagtcccgcaacgagcgcaacccctatcttatgttgccagcactttgggtgggaactcatgagagactgccgcagacaatgcggaggaaggcggggatgacgtcaaatcatcatgccccttatgacctgggctacacacgtactacaatgggagttaatagacggaagcgagatcgcgagatggagcaaacccgagaaacactctctcagttcggatcgtaggctgcaactcgcctacgtgaagtcggaatcgctagtaatcgcaggtcagcatactgcggtgaatacgttcccgggccttgtacacaccgcccgtcacaccacgaaagtcggaagtgcccaaagccggtggg

SEQ ID NO: 1981 - DNA, 1264 bp, Veillonella sp.
  ACP1
ggcggcgtgcttaacacatgcaagtcgaacgagtggcgaacgggtgagtaacgcgtaatcaacctgcccttcagagggggacaacagttggaaacgactgctaataccgcatacggaaagtcactgaaggaggggattgcgtctgattagctagttggaggggtaacggcccaccaaggcgatgatcagtagccggtctgagaggatgaacggccacattgggactgagacacggcccagactcctacgggaggcagcagtggggaatcttccgcaatggacgaaagtctgacggagcaacgccgcgtgagtgatgacggccttcgggttgtaaagctctgttaatcgggacgatgacggtaccggaatagaaagccacggctaactacgtgccagcagccgcggtaatacgtaggtggcaagcgttgtccggaattattgggcgtaaagcgcgcgcaggcggattggtcagtctgtcttaaaagttcggggcttaaccccgtgatgggatggaaactgccaatctagagtatcggagaggaaagtggaattcctagtgtagcggtgaaatgcgtagatattaggaagaacaccagtggcgaaggcgactttctggacgaactgacgctgaggcgcgaaagccaggggagcgaacgggattagataccccggtagtcctggccgtaaacgatgggtactaggtgtaggagcttctgtgccggagttaacgcaataagtaccccgcctggggagtacgaccgcaaggttgaaactcaaaggaattgacgggggcccgcacaagcggtggagtatgtggtttaattcgacgcaacgcgaagaaccttaccaggtcttgacattaacaggtggtgcacggttgtcgtcagctcgtgtcgtgagatgttgggttaagtcccgcaacgagcgcaacccctatcttatgttgccagcacgtgggaactcatgagagactgccgcagacaatgcggaggaaggcggggatgacgtcaaatcatcatgccccttatgacctgggctacacacgtactacaatgggagttagacggaagcgaaaccgcgaggtggagcaaacccgagactctctcagttcggacgtaggctgcaactcgcctacggaagtcggaatcgctagtaatcgcaggtcagcatactgcggtgaatacgttcccgggccttgtacacaccgcccgtcacaccacgaaagtcggaagtgcccaaagccggtgggtagccagccgtctaa

SEQ ID NO: 1982 - DNA, 1209 bp, Veillonella sp.
  AS16
agtggcgaacgggtgagtaacgcgtaatcaacctgcccttcagagggggacaacagttggaaacgactgctaataccgcatacggaaagtcactgaaggaggggattgcgtctgatcagctagttggaggggtaacggcccaccaaggcgatgatcagtagccggtctgagaggatgaacggccacattgggactgagacacggcccagactcctacgggaggcagcagtggggaatcttccgcaatggacgaaagtctgacggagcaacgccgcgtgagtgatgacggccttcgggttgtaaagctctgttaatcgggacgatgacggtaccggaatagaaagccacggctaactacgtgccagcagccgcggtaatacgtaggtggcaagcgttgtccggaattattgggcgtaaagcgcgcgcaggcggatcagtcagtctgtcttaaaagttcggggcttaaccccgtgaggggatggaaactgctgatctagagtatcggagaggaaagtggaattcctagtgtagcggtgaaatgcgtagatattaggaagaacaccagtggcgaaggcgactttctggacgaactgacgctgaggcgcgaaagccaggggagcgaacgggattagataccccggtagtcctggccgtaaacgatgggtactaggtgtaggagcttctgtgccggagttaacgcaataagtaccccgcctggggagtacgaccgcaaggttgaaactcaaaggaattgacgggggcccgcacaagcggtggagtatgtggtttaattcgacgcaacgcgaagaaccttaccaggtcttgacattaacaggtggtgcacggttgtcgtcagctcgtgtcgtgagatgttgggttaagtcccgcaacgagcgcaacccttatcttatgttgccagcacgtggggactcatgagagactgccgcagacaatgcggaggaaggcggggatgacgtcaaatcatcatgccccttatgacctgggctacacacgtactacaatgggagttagacggaagcgaagccgcgaggtggagcgaacccgagactctctcagttcggacgtaggctgcaactcgcctacggaagtcggaatcgctagtaatcgcaggtcagcatactgcggtgaatacgttcccgggccttgtacacaccgcccgtcacaccacgaaagtcggaagtacccaaa

SEQ ID NO: 1983 - DNA, 844 bp, Veillonella sp.
  BS32b
  modified_base (45)..(45): a, c, t, g, unknown or other
  modified_base (50)..(50): a, c, t, g, unknown or other
  modified_base (656)..(656): a, c, t, g, unknown or other
  modified_base (663)..(663): a, c, t, g, unknown or other
  modified_base (713)..(713): a, c, t, g, unknown or other
  modified_base (782)..(782): a, c, t, g, unknown or other
  modified_base (788)..(788): a, c, t, g, unknown or other
  modified_base (815)..(816): a, c, t, g, unknown or other
cgaagagcgatggaagcttgcttctatcaatcttagtggcgaacnggagngtaacgcgtaatcaacctgcccttcagagggggacaacagttggaaacgactgctaataccgcatacgatccaatctcggcatcgagactggatgaaaggtggcctctatttataagctatcactgaaggaggggattgcgtctgattagctagttggaggggtaacggcccaccaaggcgatgatcagtagccggtctgagaggatgaacggccacattgggactgagacacggcccagactcctacgggaggcagcagtggggaatcttccgcaatggacgaaagtctgacggagcaacgccgcgtgagtgatgacggccttcgggttgtaaagctctgttaatcgggacgaatggttcttgtgcgaatagtgcgaggatttgacggtaccggaatagaaagccacggctaactacgtgccagcagccgcggtaatacgtaggtggcaagcgttgtccggaattattgggcgtaaagcgcgcgcaggcggattggtcagtctgtcttaaaagttcggggcttaaccccgtgatgggatggaaactgccaatctagagtatcggagaggaaagtggaattcctagtgtagcggtgaaatgcgtanatattangaagaacaccagtggcgaaggcgactttctggacgaaaactgacgctgangcgcgaaagccaggggagcgaacgggattagataccccggtagtcctggccgtaaacgatgggtactangtgtangaggtatcgaccccttctgtgccgganntaacgcaataagtaccccgcctggggag

SEQ ID NO: 1984 - DNA, 1015 bp, Veillonella sp.
  ICM51a
  modified_base (709)..(709): a, c, t, g, unknown or other
  modified_base (979)..(979): a, c, t, g, unknown or other
  modified_base (996)..(998): a, c, t, g, unknown or other
  modified_base (1008)..(1008): a, c, t, g, unknown or other
gagcgatggaagcttgcttctatcaatcttagtggcgaacgggtgagtaacgcgtaatcaacctgcccttcagagggggacaacagttggaaacgactgctaataccgcatacgatccaatctcggcatcgagactggatgaaaggtggcctctatttataagctatcactgaaggaggggattgcgtctgattagctagttggaggggtaacggcccaccaaggcgatgatcagtagccggtctgagaggatgaacggccacattgggactgagacacggcccagactcctacgggaggcagcagtggggaatcttccgcaatggacgaaagtctgacggagcaacgccgcgtgagtgatgacggccttcgggttgtaaagctctgttaatcgggacgaatggttcttgtgcaaatagtgcgaggatttgacggtaccggaatagaaagccacggctaactacgtgccagcagccgcggtaatacgtaggtggcaagcgttgtccggaattattgggcgtaaagcgcgcgcaggcggattggtcagtctgtcttaaaagttcggggcttaaccccgtgatgggatggaaactgccaatctagagtatcggagaggaaagtggaattcctagtgtagcggtgaaatgcgtagatattaggaagaacaccagtggcgaaggcgactttctggacgaaaactgacgctgangcgcgaaagccaggggagcgaacgggattagataccccggtagtcctggccgtaaacgatgggtactaggtgtaggaggtatcgaccccttctgtgccggagttaacgcaataagtaccccgcctggggagtacgaccgcaaggttgaaactcaaaggaattgacgggggcccgcacaagcggtggagtatgtggtttaattcgacgcaacgcgaagaaccttaccaggtcttgacattgatggacagaactagagatagttcctcttcntcggaagccagaaaacnnnggtgcacggntgtcgtc

SEQ ID NO: 1985 - DNA, 971 bp, Veillonella sp.
  MSA12
  modified_base (591)..(591): a, c, t, g, unknown or other
  modified_base (703)..(703): a, c, t, g, unknown or other
  modified_base (772)..(772): a, c, t, g, unknown or other
  modified_base (869)..(869): a, c, t, g, unknown or other
tggaagcttgcttctatcaatcttagtggcgaacgggtgagtaacgcgtaatcaacctgcccttcagagggggacaacagttggaaacgactgctaataccgcatacgatctgacctcggcatcgaggatggatgaaaggtggcctctatttataagctatcactgaaggaggggattgcgtctgattagctagttggaggggtaacggcccaccaaggcgatgatcagtagccggtctgagaggatgaacggccacattgggactgagacacggcccagactcctacgggaggcagcagtggggaatcttccgcaatggacgaaagtctgacggagcaacgccgcgtgagtgatgacggccttcgggttgtaaagctctgttaatcgggacgaaaggccttcttgcgaatagttagaaggattgacggtaccggaatagaaagccacggctaactacgtgccagcagccgcggtaatacgtaggtggcaagcgttgtccggaattattgggcgtaaagcgcgcgcaggcggattggtcagtctgtcttaaaagttcggggcttaaccccgtgatgggatggaaactgccnatctagagtatcggagaggaaagtggaattcctagtgtagcggtgaaatgcgtagatattaggaagaacaccagtggcgaaggcgactttctggacgaaaactgacgctgangcgcgaaagccaggggagcgaacgggattagataccccggtagtcctggccgtaaacgatgggtactangtgtaggaggtatcgaccccttctgtgccggagttaacgcaataagtaccccgcctggggagtacgaccgcaaggttgaaactcaaaggaattgacnggggcccgcacaagcggtggagtatgtggtttaattcgacgcaacgcgaagaaccttaccaggtcttgacattgatggacagaactagagatagttcctctt

SEQ ID NO: 1986 - DNA, 1344 bp, Veillonella sp.
  NVG 100cf
cgcgtaatcaacctgcccttcagagggggacaacagttggaaacgactgctaataccgcatacgatccaacctcggcatcgaggatggatgaaaggtggcctctatttataagctatcactgaaggaggggattgcgtctgattagctagttggaggggtaacggcccaccaaggcaatgatcagtagccggtctgagaggatgaacggccacattgggactgagacacggcccagactcctacgggaggcagcagtggggaatcttccgcaatggacgaaagtctgacggagcaacgccgcgtgagtgatgacggccttcgggttgtaaagctctgttaatcgggacgaaaggtcctcttgcgaatagttagaggaattgacggtaccggaatagaaagccacggctaactacgtgccagcagccgcggtaatacgtaggtggcaagcgttgtccggaattattgggcgtaaagcgcgcgcaggcggatcagtcagtctgtcttaaaagttcggggcttaaccccgtgatgggatggaaactgctgatctagagtatcggagaggaaagtggaattcctagtgtagcggtgaaatgcgtagatattaggaagaacaccagtggcgaaggcgactttctggacgaaaactgacgctgaggcgcgaaagccaggggagcgaacgggattagataccccggtagtcctggccgtaaacgatgggtactaggtgtaggaggtatcgaccccttctgtgccggagttaacgcaataagtaccccgcctggggagtacgaccgcaaggttgaaactcaaaggaattgacgggggcccgcacaagcggtggagtatgtggtttaattcgacgcaacgcgaagaaccttaccaggtcttgacattgatggacagaactagagatagttcctcttcttcggaagccagaaaacaggtggtgcacggttgtcgtcagctcgtgtcgtgagatgttgggttaagtcccgcaacgagcgcaacccctatcttatgttgccagcacgtaatggtgggaactcatgagagactgccgcagacaatgcggaggaaggcggggatgacgtcaaatcatcatgccccttatgacctgggctacacacgtactacaatgggagttaatagacggaagcgagatcgcgagatggagcaaacccgagaaacactctctcagttcggatcgtaggctgcaactcgcctacgtgaagtcggaatcgctagtaatcgcaggtcagcatactgcggtgaatacgttcccgggccttgtacacaccgcccgtcacaccacgaaagtcggaagtgcccaaagccggtgg

SEQ ID NO: 1987 - DNA, 1441 bp, Veillonella sp.
  OK11
  modified_base (9)..(9): a, c, t, g, unknown or other
  modified_base (150)..(150): a, c, t, g, unknown or other
tcgcgtctnccatgcagtcgaaacgaagagcgatggtaagcttgcttctatcaatcttagtggcgaacgggtgagtaacgcgtaatcaaccctgcccttcagagggggacaacagttggaaacgactgctaataccgcatacgatccaanctcggcatcgaggatggatgaaaggtggcctctatttataagctatcactgaaggaggggattgcgtctgattagctagttggaggggtaacggcccaccaaggcaatgatcagtagccggtctgagaggatgaacggccacattgggactgagacacggcccagactcctacgggaggcagcagtggggaatcttccgcaatggacgaaagtctgacggagcaacgccgcgtgagtgatgacggccttcgggttgtaaagctctgttaatcgggacgaaaggtcttcttgcgaatagttagaagaattgacggtaccggaatagaaagccacggctaactacgtgccagcagccgcggtaatacgtaggtggcaagcgttgtccggaattattgggcgtaaagcgcgcgcaggcggatcagtcagtctgtcttaaaagttcggggcttaaccccgtgatgggatggaaactgctgatctagagtatcggagaggaaagtggaattcctagtgtagcggtgaaatgcgtagatattaggaagaacaccagtggcgaaggcgactttctggacgaaaactgacgctgaggcgcgaaagccaggggagcgaacgggattagataccccggtagtcctggccgtaaacgatgggtactaggtgtaggaggtatcgaccccttctgtgccggagttaacgcaataagtaccccgcctggggagtacgaccgcaaggttgaaactcaaaggaattgacgggggcccgcacaagcggtggagtatgtggtttaattcgacgcaacgcgaagaaccttaccaggtcttgacattgatggacagaactagagatagttcctcttcttcggaagccagaaaacaggtggtgcacggttgtcgtcagctcgtgtcgtgagatgttgggttaagtcccgcaacgagcgcaacccctatcttatgttgccagcacgtaatggtgggaactcatgagagactgccgcagacaatgcggaggaaggcggggatgacgtcaaatcatcatgccccttatgacctgggctacacacgtactacaatgggagttaatagacggaagcgagatcgcgagatggagcaaacccgagaaacactctctcagttcggatcgtaggctgcaactcgcctacgtgaagtcggaatcgctagtaatcgcaggtcagcatactgcggtgaatacgttcccgggccttgtacacaccgcccgtcacaccacgaaagtcggaagtgcccaaagccggtggggtaaccttcggagccgc

SEQ ID NO: 1988 - DNA, 1364 bp, Veillonella sp.
  oral clone ASCA08
  modified_base (12)..(12): a, c, t, g, unknown or other
  modified_base (445)..(445): a, c, t, g, unknown or other
  modified_base (728)..(728): a, c, t, g, unknown or other
  modified_base (815)..(815): a, c, t, g, unknown or other
  modified_base (1340)..(1340): a, c, t, g, unknown or other
  modified_base (1344)..(1344): a, c, t, g, unknown or other
ggagtttgattntggctcaggacgaacgctggcggcgtgcttaacacatgcaagtcgaacgagtggcgaacgggtgagtaacgcgtaatcaacctgcccttcagagggggataacaacgggaaaccgttgctaataccgcgtacggaaagtcgctgaaggaggggattgcgtctgattagctagttggaggggtaacggcccaccaaggcaatgatcagtagccggtctgagaggatgaacggccacattgggactgagacacggcccaaactcctacgggaggcagcagtggggaatcttccgcaatggacgaaagtctgacggagcaacgccgcgtgagtgatgaaggtcttcggattgtaaagctctgttaatcgggacgatgacggtaccggaatagaaagccacggctaactacgtgccagcagccgcggtaatacgtangtggcaagcgttgtccgaaattattgggcgtaaagcgcgcgcagccggcctatccagtctgtcttaaaagttcggggctcaaccccgtgatgggatggaaactagtaggctagagtatcggagaggaaagcggaattcctagtgtagcggtgaaatgcgtagatattaggaagaacaccagtggcgaaggcggctttctggacgaactgacgctgaggcgcgaaagcaaggcgagcgaacgggattagataccccggtagtccttgccgtaaacgatgggtantaggtgtaggagcttctgtgccggagttaacgcaataataccccgcctggggagtacggtcgcaaggctgaaactcaaaggaattgncgggggcccgcacaagcggtggagtacgtggtttaattcgacgcaacgcgaagaaccttaccaggtcttgacattaacaggtggtgcacggctgtcgtcagctcgtgtcgtgagatgttgggttaagtcccgcaacgagcgcaacccctatcttatgttgccagcacgtgggaactcatgagagactgccgcagacaatgcggaggaaggaggggatgacgtcaagtcatcatgccccttatgacctgggctacacacgtactacaatgggctttagaggggagcgaagccgcgaggtggagcaaaccccagagctctcagttcggaagtaggctgcaactcgcctacggaagtcggaatcgctagtaatcacaggtcagcatactgcggtgaatacgttcccgggccttgtacacaccgcccgtcacacaacgaaagtcggaagtacccaaagccggtgggtagccagccgtctaaggtaaagtcgatgattggggtgaagtcgtaacaaggtagccgtatcgnaagntgcggctggaacacctcctt

SEQ ID NO: 1989 - DNA, 1323 bp, Veillonella sp.
  oral clone ASCB03
  modified_base (667)..(667): a, c, t, g, unknown or other
  modified_base (676)..(676): a, c, t, g, unknown or other
  modified_base (714)..(714): a, c, t, g, unknown or other
  modified_base (720)..(720): a, c, t, g, unknown or other
  modified_base (792)..(792): a, c, t, g, unknown or other
  modified_base (803)..(803): a, c, t, g, unknown or other
ggagtttgattctggctcaggacgaacgctggcggcgtgcttaacacatgcaagtcgaacgagtggcgaacgggtgagtaacgcgtaatcaacctgcccttcagagggggataacaacgggaaaccgttgctaataccgcgtacggaaagtcgctgaaggaggggattgcgtctgattagctagttggaggggtaacggcccaccaaggcaatgatcagtagccggtctgagaggatgaacggccacattgggactgagacacggcccaaactcctacgggaggcagcagtggggaatcttccgcaatggacgaaagtctgacggaacaacgccgcgtgagtgatgaaggtctgcggattgtaaagctctgttaatcgggacgatgacggtaccggaatagaaagccacggctaactacgtgccagcagccgcggtaatacgtaggtggcaagcgttgtccggaattattgggcgtaaagcgcgcgcaggcggcctatccagtctgtcttaaaagttcggggctcaaccccgtgatgggatggaaactactaggctagagtatcggagaggaaagcggaattcctagtgtagcggtgaaatgcgtagatattaggaagaacaccagtggcgaaggcggctttctggacgaactgacgctgaggcgcnaaagccagnggagcgaacgggattagataccccggtagtcctggccntaaacnatgggtactaggtgtaggagcttctgtgccggagttaacgcaataagtaccccgcctggggagtacggtcgnaaggctgaaantcaaaggaattgacgggggcccgcacaagcggtggagtatgtggtttaattcgacgcaacgcgaagaaccttaccaggtcttgacattaacaggtggtgcacggttgtcgtcagctcgtgtcgtgagatgttgggttaagtcccgcaacgagcgcaacccctatcttatgttgccagcacgtgggaactcatgagagactgccgcagacaatgcggaggaaggcggggatgacgtcaagtcatcatgccccttatgacctgggctacacacgtactacaatgggctttagagggaagcgaagccgcgaggtggagcaaaccccagagctctcagttcggacgtaggctgcaactcgcctacggaagtcggaatcgctagtaatcgcaggtcagcatactgcggtgaatacgttcccgggccttgtacacaccgcccgtcacaccacgaaagtcggaagtacccaaagccggtgggtagccagccgtctaaggtaaagtcgatgattggggtgaagtcgta

SEQ ID NO: 1990 - DNA, 1363 bp, Veillonella sp.
  oral clone ASCG01
  modified_base (360)..(360): a, c, t, g, unknown or other
ggagtttgattatggctcaggactaacgctggcggcgtgcttaacacatgcaagtcgaacgagtggcgaacgggtgagtaacgcgtaatcaacctgcccttcagagggggacaacagttggaaacgactgctaataccgcatacggaaagtcactgaaggaggggattgcgtctgattagctagttggaggggtaacggcccaccaaggcaatgatcagtagccggtctgagaggatgaacggccacattgggactgagacacggcccagactcctacgggaggcagcagtggggaatcttccgcaatggacgaaagtctgacggtgcaacgccgcgtgagtgatgacggccttcgggtngtaaagctctgttaatcgggacgatgacggtaccggaatagaaagccacggctaactacgtgccagcagccgcggtaatacgtaggtggcaagcgttgtccggaattattgggcgtaaagcgcgcgcaggcggatcagtcagtctgtcttaaaagttcggggcttaaccccgtgatgggatggaaactgctgatctagagtatcggagaggaaagtggaattcctagtgtagcggtgaaatgcgtagatattaggaagaacaccagtggcgaaggcgactttctggacgaactgacgctgaggcgcgaaagccaggggagcgaacgggattagataccccggtagtcctggccgtaaacgatgggtactaggtgtaggagcttctgtgccggagttaacgcaataagtaccccgcctggggagtacgaccgcaaggttgaaactcaaaggaattgacgggggcccgcacaagcggtggagtatgtggtttaattcgacgcaacgcgaagaaccttaccgggtcttgacattaacaggtggtgcacggttgtcgtcagctcgtgtcgtgagatgttgggttaagtcccgcaacgagcgcaacccctatcttatgttgccagcacgtgggaactcatgagagactgccgcagacaatgcggaggaaggagaggatgacgtcaaatcatcatgccccttatgacctgggctacacacgtactacaatgggagttagacggaagcgagatcgcgagatggagcaaacccgagactctctcagttcggacgtaggctgcaactcgcctacggaagtcggaatcgctagtaatcgcaggtcagcatactgcggtgaatacgttcccgggccttgtacacaccgcccgtcacaccacgaaagtcggaagtgcccaaagccggtgggtagccagccgtctaaggtaaagtcgatgattggggtgaagtcgtaacaaggtagccgtatcggaaggtgcggctggaacacctc

SEQ ID NO: 1991 - DNA, 1296 bp, Veillonella sp.
  oral clone ASCG02
  modified_base (1102)..(1102): a, c, t, g, unknown or other
  modified_base (1143)..(1143): a, c, t, g, unknown or other
ggagtttgattctggctcaggacgaacgctggcggcgtgcttaacacatgcaagtcgaacgagtggcgaacgggtgagtaacgcgtaatcaacctgcccttcagagggggacaacagttggaaacgactgctaataccgcatacggaaagtcactgaaggaggggattgcgtctgattagctagttggaggggtaacggcccaccaaggcaatgatcagtagccggtctgagaggatgaacggccacattgggactgagacacggcccagactcctacgggaggcagcagtggggaatcttccgcaatggacgaaagtctgacggagcaacgccgcgtgagtgatgacggccttcgggttgtaaagctctgttaatcgggacgatgacggtaccggaatagaaagccacggctaactacgtgccagcagccgcggtaatacgtaggtggcaagcgttgtccggaattattgggcgtaaagcgcgcgcaggcggatcagttagtctgtcttaaaagttcggggcttaaccccgttgatgggatggaaactgctgatctagagtatcggagaggaaagtggaattcctagtgtagcggtgaaattcgtagatattaggaagaacaccagtggcgaaggcgactttctggacgaactgacgctgaggcgcgaaagccaggggagcgaacgggattagataccccggtagtcctggccgtaaacgatgggtactaggtgtaggagcttctgtgccggagttaacgcaataagtaccccgcctggggagtacgaccgcaaggttgaaactcaaaggaattgacgggggcccgcacaagcggtggagtatgtggtttaattcgacgcaacgcgaagaaccttaccaggtcttgacatcacaggtggtgcacggttgtcgtcagctcgtgtcgtgagatgttgggttaagtcccgcaacgagcgcaacccctatcttatgttgccagcacgtgggaactcatgagagactgccgcagacaatgcggaggaaggcggggatgacgtcaaatcatcatgccccttatgacctgggctactcacgtactacaatgggatagacggaagcganatcgcgagatggagcaaacccgagactctctcagttcggangtaggctgcaactcgcctacggaagtcggaatcgctagtaatcgcaggtcagcatactgcggtgaatacgttcccgggccttgtacacaccgcccgtcacaccacgaaagtcggaagtgcccaaagccggtgggtagccagccgtctaaggta

SEQ ID NO: 1992 - DNA, 1464 bp, Veillonella sp.
  oral clone OH1A
  modified_base (2)..(2): a, c, t, g, unknown or other
  modified_base (7)..(7): a, c, t, g, unknown or other
antcgancgaagagcgatggaagcttgcttctatcagtcttagtggcgaacgggtgagtaacgcgtaatcaacctgcccttcagagggggacaacagttggaaacgactgctaataccgcatacgatctaacctcggcattcaggatagatgaaaggtggcctctatttttaagctatcactgaaggaggggattgcgtctgatatgcgatagtgaggggggacggggccccccggcggatgaccagtgccggtttgagaggatgaacggccaccattggactgagacacggcccagactcctacgggaggcagcagtggggaatcttccgcaatggacgaaagtctgacggagcaacgccgcgtgagtgatgacggccttcgggtttaaagcttcgttaatcgggaagaaagggcctctgcgcgaacagtgagaaggattgacggtaccggaatagaaagccacggctaactacgtgccagcagccgcggtaatacgtaggtggcaagcgttgtccggaattattgggcgtaaagcgcgcgcaggcggatcagtcagtctgtcttaaaagttcggggcttaaccccgtgatgggatggaaactgctgatctagagtatcggagaggaaagtggaattcctagtgtagcggtgaaatgcgtagatattaggaagaacaccagtggcgaaggcgactttctggacgaaaactgacgctgaggcgcgaaagccaggggagcgaacgggattagataccccggtagtcctggccgtaaacgatgggtactaggtgtaggaggtatcgaccccttctgtgccggagttaacgcaataagtaccccgcctggggagtacgaccgcaaggttgaaactcaaaggaattgacgggggcccgcacaagcggtggagtatgtggtttaattcgacgcaacgcgaagaaccttaccaggtcttgacattgagtgaaagggcaagagattgtccccttatcttcggataacacgaaaacaggtggtgcatggttgtcgtcagctcgtgtcgtgagatgttgggttaagtcccgcaacgagcgcaacccctatcttatgttgccagcacttcgggtgggaactcatgagagactgccgcagacaatgcagaggaaggcggggatgacgtcaaatcatcatgccccttatgacctgggctacacacgtactacaatgggagttaatagacggaagcgagatcgcgagatggagcaaacccgagaaacactctttcagttcggatggtaggctgcaactcgcctacgtgaagtcggaatcgctagtaatcgcaggtcagcatactgcggtgaatacgttcccgggccttgtacacaccgcccgtcacaccacgaaagtcggaagtgcccaaagccggtggggtaaccttcgggagccagccgtctaaggtaaagtcgatgattggggaaaagtcgtaa

SEQ ID NO: 1993 - DNA, 976 bp, Veillonella sp.
  oral taxon 158
  modified_base (543)..(543): a, c, t, g, unknown or other
  modified_base (875)..(875): a, c, t, g, unknown or other
  modified_base (897)..(897): a, c, t, g, unknown or other
  modified_base (918)..(918): a, c, t, g, unknown or other
  modified_base (925)..(925): a, c, t, g, unknown or other
  modified_base (936)..(936): a, c, t, g, unknown or other
  modified_base (961)..(961): a, c, t, g, unknown or other
  modified_base (968)..(968): a, c, t, g, unknown or other
gagcgatggaagcttgcttctatcaatcttagtggcgaacgggtgagtaacgcgtaatcaacctgcccttcagagggggacaacagttggaaacgactgctaataccgcatacgatccaacctcggcatcgaggatggatgaaaggtggcctctatttataagctatcactgaaggaggggattgcgtctgattagctagttggaggggtaacggcccaccaaggcaatgatcagtagccggtctgagaggatgaacggccacattgggactgagacacggcccagactcctacgggaggcagcagtggggaatcttccgcaatggacgaaagtctgacggagcaacgccgcgtgagtgatgacggccttcgggttgtaaagctctgttaatcgggacgaaaggtcctcttgcgaatagttagaggaattgacggtaccggaatagaaagccacggctaactacgtgccagcagccgcggtaatacgtaggtggcaagcgttgtccggaattattgggcgtaaagcgcgcgcaggcggatcanttagtctgtcttaaaagttcggggcttaaccccgtgatgggatggaaactgctgatctagagtatcggagaggaaagtggaattcctagtgtagcggtgaaatgcgtagatattaggaagaacaccagtggcgaaggcgactttctggacgaaaactgacgctgaggcgcgaaagccaggggagcgaacgggattagataccccggtagtcctggccgtaaacgatgggtactaggtgtaggaggtatcgaccccttctgtgccggagttaacgcaataagtaccccgcctggggagtacgaccgcaaggttgaaactcaaaggaattgacnggggcccgcacaagcggtggantatgtggtttaattcgacgcnacgcgangaaccttaccnggtcttgacattgatggacagaacnagagatngttcctct

SEQ ID NO: 1994 - DNA, 1229 bp, Veillonellaceae bacterium oral taxon 131
gacgaacgctggcggcgtgcttaacacatgcaagtcgaacgagacggattgggagcttgctcctgacaagtcgagtggcaaacgggtgagtaacgcgtagacaacctgccgcaaagatggggacaacagcccgaaagggctgctaataccgaatgttgcgcccctcccgcatgggaggggcgccaaagatggcctctgcctgcaagccatcgctttgcgatgggtcctgcgccttattagccagttggcggggcaacggcccaccaaggcgacgatcagtagccggtcctgagaggatggacggccacattgggactgagacacggcccagactcctacgggaggcagcagtggggaatcttccgcaatgggcgaaagcctgacggagcaacgccgcgtgggtgaagaaggtcttcggatgcgtaaagccctgttgcccgggacgaacgcccccggcgcgaacagcgccggggggtgacggtaccgggcgaggaagccacggccaactacgtgccagcagccgcggtaatacgtaggtggcgagcgttgtccggaatcattgggcgtaaagggagcgcaggcgggcatgcaagtccatcttaaaagcgcggggcccaaccccgcgaggggatggaaactgcatgccttgagtgcaggagaggaaagcggaattcccagtgtagcggtgaaatgcgtagatattgggaggaacaccagtggcgaaggcggctttctggactgcaactgacgctgaggctcgaaagccaggggagcgaacgggattagataccccggtagtcctggccgtaaacgatgaatgctaggtgtggggggtatcgacccctcccgtgccggagtcaacgcaataagcattccgcctggggagtacggccgcaaggctgagactcaaaggaattgacgggggcccgcacaagcggtggagtatgtggttcaattcgacgcatggcgaaggaaccttaccagggccttgacattgagtgacacgggccggagacggcccccctcccctcgggggacacggaaaacagggtggtgcagtggctgtcgtcagcctcgttgtcgtgagatgtggggtcaagatcccgccaccgagcgccaccccccgttccctcgttggccagcgacgcacagggcggggaacccaagggaagaccgccgccggactacgccgaggaaggcgggggacgacgttcagttattcatgcccc

SEQ ID NO: 1995 - DNA, 1511 bp, Veillonellaceae bacterium oral taxon 155
gagtttgatcctggctcaggacgaacgctggcggcgtgcttaacacatgcaagtcgaacggagctgatttatttcggtaaatcgcttagtggcaaacgggtgagtaacgcgtaggcaacctgccctcaggatggggacaacggctcgaaagagccgctaataccgaatgacgtaactcttccacatggaagagatactaaagatgggtcaaaccatcgcctaaggatgggcctgcgtctgattagccagttggtgaggtaacggctcaccaaagcgacgatcagtagccggtctgagaggatgaacggccacaatgggactgagacacggcccatactcctacgggaggcagcagtggggaatcttccgcaatgggcgaaagcctgacggagcaacgccgcgtgagtgaagaaggtcttcggatcgtaaagctctgttgtcggggacgaaagagtagacgaggaaatgcgtctactaagacggtacccgacgaggaagccacggctaactacgtgccagcagccgcggtaatacgtaggcggcaagcgttgtccggaattattgggcgtaaagggagcgcaggtgggacggtaagtccgtcttaaaaggcaggggctcagcccctgtaagggatggaaactatcgatcttgagtgccggagaggaaagcggaattcccagtgtagcggtgaaatgcgtagatattgggaagaacaccagtggcgaaggcggctttctggacggcaactgacactgaggctcgaaagccaggggagcgaacgggattagataccccggtagtcctggccgtaaacgatggatactaggtgtaggaggtatcgacccctcctgtgccggagttaacgcaataagtatcccgcctggggagtacggtcgcaagactgaaactcaaaggaattgacgggggcccgcacaagcggtggagtatgtggtttaattcgacgcaacgcgaagaaccttaccagggcttgacattgagtgaaagggcaagagattgtccccttatcttcggataacacgaaaacaggtggtgcatggctgtcgtcagctcgtgtcgtgagatgttgggttaagtcccgcaacgagcgcaacccctatattctgttgccaacaggtaaagctgggaactcaggatagactgccgcggagaacgcggaggaaggcggggatgacgtcaagtcatcatgccccatatgacctgggctacacacgtactacaatgggatgtacagagggcagcgaaagagcgatctggagcgaaccccagaaaacatctcccagttcggattgcaggctgaaacccgcctgcatgaagatggaatcgctagtaatcgcaggtcagcatactgcggtgaatacgttcccgggccttgtacacaccgcccgtcacaccacggaagtcattcacacccgaagccggtgaaagccgtcgaaggtgggggcgatgactggggtgaagtcgtaacaaggtagccgtatcggaaggtgcgg

SEQ ID NO: 1996 - DNA, 1547 bp, Vibrio cholerae
tttaattgaagagtttgatcatggctcagattgaacgctggcggcaggcctaacacatgcaagtcgagcggcagcacagaggaacttgttccttgggtggcgagcggcggacgggtgagtaatgcctgggaaattgcccggtagagggggataaccattggaaacgatggctaataccgcataacctcgcaagagcaaagcaggggaccttcgggccttgcgctaccggatatgcccaggtgggattagctagttggtgaggtaagggctcaccaaggcgacgatccctagctggtctgagaggatgatcagccacactggaactgagacacggtccagactcctacgggaggcagcagtggggaatattgcacaatgggcgcaagcctgatgcagccatgccgcgtgtatgaagaaggccttcgggttgtaaagtactttcagtagggaggaaggtggttaagctaataccttaatyatttgacgttacctacagaagaagcaccggctaactccgtgccagcagccgcggtaatacggagggtgcaagcgttaatcggaattactgggcgtaaagcgcatgcaggtggtttgttaagtcagatgtgaaagccctgggctcaacctaggaatcgcatttgaaactgacaagctagagtactgtagaggggggtagaatttcaggtgtagcggtgaaatgcgtagagatctgaaggaataccggtggcgaaggcggccccctggacagatactgacactcagatgcgaaagcgtggggagcaaacaggattagataccctggtagtccacgccgtaaacgatgtctacttggaggttgtgmcctagaggtcgtggctttcggagctaacgcgttaagtagaccgcctggggagtacggtcgcaagattaaaactcaaatgaattgacgggggcccgcacaagcggtggagcatgtggtttaattcgatgcaacgcgaagaaccttacctactcttgacatccagagaatctagcggagacgctggagtgccttcgggaactctgagacaggtgctgcatggctgtcgtcagctcgtgttgtgaaatgttgggttaagtcccgcaacgagcgcaacccttatccttgtttgccagcacgtaatggtgggaactccagggagactgccggtgataaaccggaggaaggtggggacgacgtcaagtcatcatggcccttacgagtagggctacacacgtgctacaatggcgtatacagagggcagcgataccgcgaggtggagcgaatctcacaaagtacgtcgtagtccggattggagtctgcaactcgactccatgaagtcggaatcgctagtaatcgcaaatcagaatgttgcggtgaatacgttcccgggccttgtacacaccgcccgtcacaccatgggagtgggctgcaaaagaagcaggtagtttaaccttcgggaggacgcttgccactttgtggttcatgactggggtgaagtcgtaacaaggtagcgctaggggaacctggcgctggatcacctccttac

SEQ ID NO: 1997 - DNA, 1537 bp, Vibrio fluvialis
  modified_base (11)..(12): a, c, t, g, unknown or other
agagtttgatnntggctcagattgaacgctggcggcaggcctaacacatgcaagtcgagcggcagcgacagagaaacttgtttctcgggcggcgagcggcggacgggtgagtaatgcctgggaaattgccctgatgtgggggataaccattggaaacgatggctaataccgcatgatagcttcggctcaaagagggggaccttcgggcctctcgcgtcaggatatgcccaggtgggattagctagttggtgaggtaagggctcaccaaggcgacgatccctagctggtctgagaggatgatcagccacactggaactgagacacggtccagactcctacgggaggcagcagtggggaatattgcacaatgggcgcaagcctgatgcagccatgccgcgtgtatgaagaaggccttcgggttgtaaagtactttcagcagtgaggaaggaggtatcgttaatagcggtatcttttgacgttagctgcagaagaagcaccggctaactccgtgccagcagccgcggtaatacggagggtgcgagcgttaatcggaattactgggcgtaaagcgcatgcaggtggtttgttaagtcagatgtgaaagcccggggctcaacctcggaattgcatttgaaactggcaggctagagtactgtagaggggggtagaatttcaggtgtagcggtgaaatgcgtagagatctgaaggaataccggtggcgaaggcggccccctggacagatactgacactcagatgcgaaagcgtggggagcaaacaggattagataccctggtagtccacgccgtaaacgatgtctacttggaggttgtggccttgagccgtggctttcggagctaacgcgttaagtagaccgcctggggagtacggtcgcaagattaaaactcaaatgaattgacgggggcccgcacaagcggtggagcatgtggtttaattcgatgcaacgcgaagaaccttacctactcttgacatccagagaacttagcagagatgctttggtgccttcgggaactctgagacaggtgctgcatggctgtcgtcagctcgtgttgtgaaatgttgggttaagtcccgcaacgagcgcaacccttatccttgtttgccagcgagtaatgtcgggaactccagggagactgccggtgataaaccggaggaaggtggggacgacgtcaagtcatcatggcccttacgagtagggctacacacgtgctacaatggcgcatacagagggcggccaacttgcgaaagtgagcgaatcccaaaaagtgcgtcgtagtccggattggagtctgcaactcgactccatgaagtcggaatcgctagtaatcgtgaatcagaatgtcacggtgaatacgttcccgggccttgtacacaccgcccgtcacaccatgggagtgggctgcaaaagaagcaggtagtttaaccttcgggaggacgcttgccactttgtggttcatgactggggtgaagtcgtaacaaggtagcgctaggggaacctggcgctggatcacctccttt

SEQ ID NO: 1998 - DNA, 1554 bp, Vibrio furnissii
taaattgaagagtttgatcatggctcagattgaacgctggcggcaggcctaacacatgcaagtcgagcggcagcgacaacattgaaccttcgggggatttgttgggcggcgagcggcggacgggtgagtaatgtctgggaaattgccctgatgtgggggataaccattggaaacgatggctaataccgcatgatagcttcggctcaaagagggggaccttcgggcctctcgcgtcaggatatgcccaggtgggattagctagttggtgaggtaagggctcaccaaggcgacgatccctagctggtctgagaggatgatcagccacactggaactgagacacggtccagactcctacgggaggcagcagtggggaatattgcacaatgggcgcaagcctgatgcagccatgccgcgtgtatgaagaaggccttcgggttgtaaagtactttcagcagtgaggaaggggatatcgttaatagcggtattctttgacgttagctgcagaagaagcaccggctaactccgtgccagcagccgcggtaatacggagggtgcgagcgttaatcggaattactgggcgtaaagcgcatgcaggtggtttgttaagtcagatgtgaaagcccggggctcaacctcggaattgcatttgaaactggcaggctagagtactgtagaggggggtagaatttcaggtgtagcggtgaaatgcgtagagatctgaaggaataccggtggcgaaggcggccccctggacagatactgacactcagatgcgaaagcgtggggagcaaacaggattagataccctggtagtccacgccgtaaacgatgtctacttggaggttgtggccttgagccgtggctttcggagctaacgcgttaagtagaccgcctggggagtacggtcgcaagattaaaactcaaatgaattgacgggggcccgcacaagcggtggagcatgtggtttaattcgatgcaacgcgaagaaccttacctactcttgacatccagagaacttagcagagatgctttggtgccttcgggaactctgagacaggtgctgcatggctgtcgtcagctcgtgttgtgaaatgttgggttaagtcccgcaacgagcgcaacccttatccttgtttgccagcgagtaatgtcgggaactccagggagactgccggtgataaaccggaggaaggtggggacgacgtcaagtcatcatggcccttacgagtagggctacacacgtgctacaatggcgcatacagagggcagccaacttgcgaaagtgagcgaatcccaaaaagtgcgtcgtagtccggattggagtctgcaactcgactccatgaagtcggaatcgctagtaatcgtggatcagaatgccacggtgaatacgttcccgggccttgtacacaccgcccgtcacaccatgggagtgggctgcaaaagaagcaggtagtttaaccttcgggaggacgcttgccactttgtggttcatgactggggtgaagtcgtaacaaggtagcgctaggggaacctggcgctggatcacctcctta

SEQ ID NO: 1999 - DNA, 1536 bp, Vibrio mimicus
agagtttgatcatggctcagattgaacgctggcggcaggcctaacacatgcaagtcgagcggcagcacagaggaacttgttccttgggtggcgagcggcggacgggtgagtaatgcctgggaaattgcccggtagagggggataaccattggaaacgatggctaataccgcataacctcgcaagagcaaagcaggggaccttcgggccttgtgctaccggatatgcccaggtgggattagctagttggtgaggtaagggctcaccaaggcgacgatccctagctggtctgagaggatgatcagccacactggaactgagacacggtccagactcctacgggaggcagcagtggggaatattgcacaatgggcgcaagcctgatgcagccatgccgcgtgtatgaagaaggccttcgggttgtaaagtactttcagtagggaggaaggtggttaagttaataccttaatcatttgacgttacctacagaagaagcaccggctaactccgtgccagcagccgcggtaatacggagggtgcaagcgttaatcggaattactgggcgtaaagcgcatgcaggtggtttgttaagtcagatgtgaaagccctgggctcaacctaggaattgcatttgaaactgacaagctagagtactgtagaggggggtagaatttcaggtgtagcggtgaaatgcgtagagatctgaaggaataccggtggcgaaggcggccccctggacagatactgacactcagatgcgaaagcgtggggagcaaacaggattagataccctggtagtccacgccgtaaacgatgtctacttggaggttgtgacctagagtcgtggctttcggagctaacgcgttaagtagaccgcctggggagtacggtcgcaagattaaaactcaaatgaattgacgggggcccgcacaagcggtggagcatgtggtttaattcgatgcaacgcgaagaaccttacctactcttgacatccagagaatctagcggagacgctggagtgccttcgggaactctgagacaggtgctgcatggctgtcgtcagctcgtgttgtgaaatgttgggttaagtcccgcaacgagcgcaacccttatccttgtttgccagcacgtaatggtgggaactccagggagactgccggtgataaaccggaggaaggtggggacgacgtcaagtcatcatggcccttacgagtagggctacacacgtgctacaatggcgtatacagagggcagcgataccgcgaggtggagcgaatctcacaaagtacgtcgtagtccggattggagtctgcaactcgactccatgaagtcggaatcgctagtaatcgcaaatcagaatgttgcggtgaatacgttcccgggccttgtacacaccgcccgtcacaccatgggagtgggctgcaaaagaagcaggtagtttaaccttcgggaggacgcttgccactttgtggttcatgactggggtgaagtcgtaacaaggtagcgctaggggaacctggcgctggatcacctcctta

SEQ ID NO: 2000 - DNA, 1554 bp, Vibrio parahaemolyticus
taaattgaagagtttgatcatggctcagattgaacgctggcggcaggcctaacacatgcaagtcgagcggaaacgagttatctgaaccttcggggaacgatatcggcgtcgagcggcggacgggtgagtaatgcctaggaaattgccctgatgtgggggataaccattggaaacgatggctaataccgcatgatgcctacgggccaaagagggggaccttcgggcctctcgcgtcaggatatgcctaggtgggattagctagttggtgaggtaagggctcaccaaggcgacgatccctagctggtctgagaggatgatcagccacactggaactgagacacggtccagactcctacgggaggcagcagtggggaatattgcacaatgggcgcaagcctgatgcagccatgccgcgtgtgtgaagaaggccttcgggttgtaaagcactttcagtcgtgaggaaggtagtgtagttaatagctgcattatttgacgttagcgacagaagaagcaccggctaactccgtgccagcagccgcggtaatacggagggtgcgagcgttaatcggaattactgggcgtaaagcgcatgcaggtggtttgttaagtcagatgtgaaagcccggggctcaacctcggaattgcatttgaaactggcagactagagtactgtagaggggggtagaatttcaggtgtagcggtgaaatgcgtagagatctgaaggaataccggtggcgaaggcggccccctggacagatactgacactcagatgcgaaagcgtggggagcaaacaggattagataccctggtagtccacgccgtaaacgatgtctacttggaggttgtggccttgagccgtggctttcggagctaacgcgttaagtagaccgcctggggagtacggtcgcaagattaaaactcaaatgaattgacgggggcccgcacaagcggtggagcatgtggtttaattcgatgcaacgcgaagaaccttacctactcttgacatccagagaactttccagagatggattggtgccttcgggaactctgagacaggtgctgcatggctgtcgtcagctcgtgttgtgaaatgttgggttaagtcccgcaacgagcgcaacccttatccttgtttgccagcgagtaatgtcgggaactccagggagactgccggtgataaaccggaggaaggtggggacgacgtcaagtcatcatggcccttacgagtagggctacacacgtgctacaatggcgcatacagagggcggccaacttgcgaaagtgagcgaatcccaaaaagtgcgtcgtagtccggattggagtctgcaactcgactccatgaagtcggaatcgctagtaatcgtggatcagaatgccacggtgaatacgttcccgggccttgtacacaccgcccgtcacaccatgggagtgggctgcaaaagaagtaggtagtttaaccttcggggggacgcttaccactttgtggttcatgactggggtgaagtcgtaacaaggtagcgctaggggaacctggcgctggatcacctcctta

SEQ ID NO: 2001 - DNA, 1536 bp, Vibrio sp.
  RC341
agagtttgatcatggctcagattgaacgctggcggcaggcctaacacatgcaagtcgagcggcagcacagaggaacttgttccttgggtggcgagcggcggacgggtgagtaatgcctgggaaattgcccggtagagggggataaccattggaaacgatggctaataccgcataacctcgcaagagcaaagcaggggaccttcgggccttgcgctaccggatatgcccaggtgggattagctagttggtgaggtaagggctcaccaaggcgacgatccctagctggtctgagaggatgatcagccacactggaactgagacacggtccagactcctacgggaggcagcagtggggaatattgcacaatgggcgcaagcctgatgcagccatgccgcgtgtatgaagaaggccttcgggttgtaaagtactttcagtagggaggaaggtggttaagctaataccttaatcatttgacgttacctacagaagaagcaccggctaactccgtgccagcagccgcggtaatacggagggtgcaagcgttaatcggaattactgggcgtaaagcgcatgcaggtggtttgttaagtcagatgtgaaagccctgggctcaacctaggaatcgcatttgaaactgacaagctagagtactgtagaggggggtagaatttcaggtgtagcggtgaaatgcgtagagatctgaaggaataccggtggcgaaggcggccccctggacagatactgacactcagatgcgaaagcgtggggagcaaacaggattagataccctggtagtccacgccgtaaacgatgtctacttggaggttgtgacctagagtcgtggctttcggagctaacgcgttaagtagaccgcctggggagtacggtcgcaagattaaaactcaaatgaattgacgggggcccgcacaagcggtggagcatgtggtttaattcgatgcaacgcgaagaaccttacctactcttgacatccagagaatctagcggagacgctggagtgccttcgggaactctgagacaggtgctgcatggctgtcgtcagctcgtgttgtgaaatgttgggttaagtcccgcaacgagcgcaacccttatccttgtttgccagcacgtaatggtgggaactccagggagactgccggtgataaaccggaggaaggtggggacgacgtcaagtcatcatggcccttacgagtagggctacacacgtgctacaatggcgtatacagagggcagcgataccgcgaggtggagcgaatctcacaaagtacgtcgtagtccggattggagtctgcaactcgactccatgaagtcggaatcgctagtaatcgcaaatcagaatgttgcggtgaatacgttcccgggccttgtacacaccgcccgtcacaccatgggagtgggctgcaaaagaagcaggtagtttaaccttcgggaggacgcttgccactttgtggttcatgactggggtgaagtcgtaacaaggtagcgctaggggaacctggcgctggatcacctcctta

SEQ ID NO: 2002 - DNA, 1542 bp, Vibrio vulnificus
aattgaagagtttgatcatggctcagattgaacgctggcggcaggcctaacacatgcaagtcgagcggcagcacagagaaacttgtttctcgggtggcaagcggcggacgggtgagtaatgcctgggaaattgccctgatgtgggggataaccattggaaacgatggctaataccgcatgatgcctacgggccaaagagggggaccttcgggcctctcgcgtcaggatatgcccaggtgggattagctagttggtgaggtaagggctcaccaaggcgacgatccctagctggtctgagaagatgatcagccacactggaactgagacacggtccagacttctacgggaggcagcagtggggaatattgcacaatgggcgcaagcctgatgcagccatgccgcgtgtgtgaagaaggccttcgggttgtaaagcactttcagttgtgaggaaggtggtgtcgttaatagcggcatcatttgacgttagcaacagaagaagcaccggctaactccgtgccagcagccgcggtaatacggagggtgcgagcgttaatcggaattactgggcgtaaagcgcatgcaggtggtttgttaagtcagatgtgaaagcccggggctcaacctcggaactgcatttgaaactggcagactagagtactgtagaggggggtagaatttcaggtgtagcggtgaaatgcgtagagatctgaaggaataccggtggcgaaggcggccccctggacagatactgacactcagatgcgaaagcgtggggagcaaacaggattagataccctggtagtccacgctgtaaacgatgtctacttggaggttgtggccttgagccgtggctttcggagctaacgcgttaagtagaccgcctggggagtacggtcgcaagattaaaactcaaatgaattgacgggggcccgcacaagcggtggagcatgtggtttaattcgatgcaacgcgaagaaccttacctactcttgacatccagagaagccagcggagacgcaggtgtgccttcgggaactctgagacaggtgctgcatggctgtcgtcagctcgtgttgtgaaatgttgggttaagtcccgcaacgagcgcaacccttatccttgtttgccagcgagtaatgtcgggaactccagggagactgccggtgataaaccggaggaaggtggggacgacgtcaagtcatcatggcccttacgagtagggctacacacgtgctacaatggcgcatacagagggcggccaacttgcgaaagtgagcgaatcccaaaaagtgcgtcgtagtccggattggagtctgcaactcgactccatgaagtcggaatcgctagtaatcgtggatcagaatgccacggtgaatacgttcccgggccttgtacacaccgcccgtcacaccatgggagtgggctgcaaaagaagtgggtagtttaaccttcgggaggacgctcaccactttgtggttcatgactggggtgaagtcgtaacaaggtagcgctaggggaacctggcgctggatcacctcctta

SEQ ID NO: 2003 - DNA, 1467 bp, Victivallaceae bacterium NML 080035
tcagaacgaacgctggcggcatggattaggcatgcaagttgaacgaaccacttcggtggagagtagcggaagggtgaggaacgcgtgagtaatctgccccctagttgggaataacagttggaaacgactgctaataccgaatgtggcttcaatcctgcatgggatggaggctaaagatttatcgctaggggatgagctcgcgtcccattaggtagttggtgaggtaacggcccaccaagccgacgatgggtagctggtctgagaggatggtcagccacactgggactgagacactgcccagactcctacgggaggctgcagtcgagaatcttgggcaatgcgcgaaagcgtgacccagcaatgccgcgtgtgtgatgaaggccttcgggtcgtaaagcactgtctcccgtgacgaaatttgacggtagcggggaaggaagccacggctaactacgtgccagcagccgcggtaatacgtaggtggcgagcgttgttcggatttattgggcgtaaagggtctgtaggaggttcgttaaatacgaggtgaaatcccgaagctcaacttcggaactgccttgtagactgacggactagagtaccggagaggtaagcggaataccaggtgtagcggtggaatgcgtagatatctggtagaacaccaatagcgaaggcagcttgctggacggaaactgactctgaaagacgaaagcatggggagcaaacaggattagataccctggtagtccatgccgtaaacgttgtcaacttgatgtggggggatttagtcctctccgtatcgaagctaacgcgataagttgaccgcctggggactacggccgcaaggctaaaactcaaaggaattgacgggggcccgcacaagcggtggagcatgtggcttaattcgaggcaacgcgaagaaccttacctggtcttgaaatatatcggaccgcctgtgaaagcaggcttcccttcggggctgatatacaggtgctgcatggctgtcgtcagctcgtgccgtgaggtgttcggttaagtccggcaacgagcgcaacccgtgtcactagttgccatcaagtaatgttggggactctagtgagactgcctgtgttaagcaggaggaaggcgcggatgacgtcaagtcagtatggcccttacgaccagggctgcacacgtgctacaatggggggtacaatgggatgcaatgtcgcgaggcggagcaaatccacaaaacctctcttagttcagattgcagtctgcaactcgactgcatgaagttggaatcgctagtaaaggcgtatcagctacgacgccttgaatacgttcccgggccttgtacacaccgcccgtcacatcatgggagttgactgcacccgaaatcggtgatctaacctgcaaaggaagaagccgcctaaggtgtggtcgatgactgggatgaagtcgtaacaaggtagccgtaggggaacctgc

SEQ ID NO: 2004 - DNA, 1332 bp, Victivallis vadensis
cttcgggagtgagtagcgaaagggtgaggaacgcgtgagtaatctgcccataagttgggaacaacagttggaaacgactgctaataccgaatgtggctattgacccgcatgggtttttggctaaagatttatcgcttatggatgagctcgcgtcccattagctagttggtgaggtaacggcccaccaaggctacgatgggtagctggtctgagaggatggtcagccacactgggactgagacactgcccagactcctacgggaggctgcagtcgagaatcttgggcaatgcgcgaaagcgtgacccagcaatgccgcgtgcatgatgaaggccctcgggtcgtaaaatgctgtctcccgtgacgaataatgacggtagcggggaaggaagccacggctaactactgccagcagcgcggtaatacgtaggtggcgagcgttgttcggatttattgggcgtaaagggtctgtaggaggtttgttaaatacgaggtgaaatccgggggctcacttccgaattgccttgtagactgatgaactagagtactggagaggtaagcggaataccaggtgtagcggtggaatgcgtagatatctggtagaacaccaatagcgaaggcagcttgctggacagaaactgactctgaaagacgaaagcatggggagcaaacaggattagataccctggtagtccatgccgtaaacgttgtcaacttgatgtgggcggatttagtcctgtccgtatcgaagctaacgcgataagttgaccgcctgggaactacggccgcaaggctaaaactcaaaggaattgacgggggcccgcacaagcggtggagcatgtggcttaattcgaggcaacgcgaagaaccttacctgggcttgaaatataccggaccggctgtgaaagcagtcttctcttcggagctggtatacaggtgctgcatggctgtcgtcagctcgtgccgtgagttgctcggttaagtccggcaacgagcgcaacccgtgtcattagttgccaacaggtaatgctggggactctaatgagactgcctgtgttaagcaggaggaaggcgcggatgacgtcaagtcagtatggcccttacgcccagggctgcacacgtgctacaatggggggtacaatgagaagcgaagtcgcgaggcggagcaaatctacaaaacctctcttagttcagattgcagtctgcaactcgactgcatgaagttggaatcgctagtaaatgcgtatcagctacgacgcattgaatacgttcccgggccttgtacacaccgcccgtcacatcatgggagttgattgcacccgaaatcggtgatc

SEQ ID NO: 2005 - DNA, 1506 bp, Virgibacillus proomii
gcggcgtgcctaatacatgcaagtcgagcgcgggaagcaagcagaaccccttcgggggtgacgcatgtggaacgagcggcggacgggtgagtaacacgtgggcaacctgcctgtaagactgggataactccgggaaaccggggctaataccggataatacgttttcttgcataaggagacgttaaaaggcggcgcaagctgtcacttacagatgggcccgcggcgcattagctagttggtggggtaaaagcctaccaaggcgacgatgcgtagccgacctgagagggtgatcggccacactgggactgagacacrgcccagactcctacgggaggcagcagtagggaatcttccgcaatggacgaaagtctgacggagcaacgccgcgtgagtgaagaaggttttcggatcgtaaaactctgttgttagggaagaacaagtgccgttcaaatagggcggcaccttgacggtacctaaccagaaagccccggctaactacgtgccagcagccgcggtaatacgtagggggcaagcgttgtccggaattattgggcgtaaagcgcgcgcaggcggtcttttaagtctgatgtgaaagcccacggcttaaccgtggagggccattggaaactggaggacttgagtacagaagaggagagtggaattccacgtgtagcggtgaaatgcgtagagatgtggaggaacaccagtggcgaaggcgactctctggtctgtaactgacgctgaggtgcgaaagcgtgggtagcgaacaggattagataccctggtagtccacgccgtaaacgatgagtgctaggtgttagggggtttccgccccttagtgctgcagttaacgcattaagcactccgcctggggagtacggccgcaaggctgaaactcaaaagaattgacggggacccgcacaagcggtggagcatgtggtttaattcgaagcaacgcgaagaaccttaccaggtcttgacatcctctgacggccctagagatagggagttcccttcggggacagagtgacaggtggtgcatggttgtcgtcagctcgtgtcgtgagatgttgggttaagtcccgcaacragcgcaacccttgatcttarttgccagcattcagttgggcactctaaggtgactgccggtgacaaaccggaggaaggtggggatgacgtcaaatcatcatgccccttatgacctgggctacacacgtgctacaatggatggaacaaagggcagcgaagccgtgaggccaagcaaatcccacaaaaccattctcagttcggattgcaggctgcaactcgcctgcatgaagccggaatcgctagtaatcgcggatcagcatgccgcggtgaatacgttcccgggtcttgtacacaccgcccgtcacaccacgagagttggtaacacccgaagtcggtgaggtaaccgtaaggagccagccgccgaaggtgggaccaatgattggggtgaagtcgtaacaaggtasccgtatcggaagg

SEQ ID NO: 2006 - DNA, 1483 bp, Weissella beninensis
gcctggcggcgtgcctaatacatgcaagtcgaacgcattgtcgtggttatgatttgttaagcttgcttaacattgattaatcgccatacaatgagtggcgaacgggtgagtaacacgtgggaaacctacctcttagcaggggataacatttggaaacagatgctaataccgtataacaaataaaaccgcatggttttattttaaaagatggttctgctatcactaagagatggtcccgcggtgtattagctagatggtgaggtaatggctcaccatggcaatgatacatagccgagttgagagactgatcggccacattggaactgagacacggtccaaactcctacgggaggcagcagtagggaatcttccacaatgggcgcaagcctgatggagcaacgccgcgtgtgtgatgaagggtttcggctcgtaaaacactgttataagagaagaacgtcagtgagagtaactgttcattgagtgacggtatcttatcagaaagggacggctaaatacgtgccagcagccgcggtaatacgtatgtcccaagcgttatccggatttattgggcgtaaagcgagcgcaggcggttatttaagtctgatgtgaaagcctacggctcaaccgtagaattgcatcggaaactggatgacttgagtgcagtagaggagagtggaactccatgtgtagcggtgaaatgcgtagatatatggaagaacaccagaggcgaaggcggctctctggactgtaactgacgctgaggctcgaaagtgtgggtagcaaacaggattagataccctggtagtccacaccgtaaacgatgaatgctagttgttagagggtttccgccctttagtgacgcagctaacgcagtaagcattccgcctggggagtacgaccgcaaggttgaaactcaaaggaattgacgggggcccgcacaagcggtggagcatgtggtttaattcgaagcaacgcgaagaaccttaccaggtcttgacatctttcgctatcttaagagattaagagttcccttcggggacggaatgacaggtggtgcatggttgtcgtcagctcgtgtcgtgagatgttgggttaagtcccgcaacgagcgcaacccttattactagttgccagcatttagttgggcactctagtgagactgccggtgacaaaccggaggaaggtggggatgacgtcaaatcatcatgccccttatgacctgggctacacacgtgctacaatggatggtacaacgagtcgcaaagtcgcgaggctaagctaatctcttaaagccattctcagttcggattgtagtctgcaactcgactacatgaagtcggaatcgctagtaatcgcggatcagcacgccgcggtgaatacgttcccgggccttgtacacaccgcccgtcacaccatgagagtttgtaacacccaaagtcggtggggtaaccttttaggagccagccgcctaaggtgggataga

SEQ ID NO: 2007 - DNA, 1529 bp, Weissella cibaria
gatgaacgctggcggcgtgcctaatacatgcaagtcgaacgctttgtggttcaactgatttgaagagcttgctcagatatgacgatggacattgcaaagagtggcgaacgggtgagtaacacgtgggaaacctacctcttagcaggggataacatttggaaacagatgctaataccgtataacaatagcaaccgcatggttgctacttaaaagatggttctgctatcactaagagatggtcccgcggtgcattagttagttggtgaggtaatggctcaccaagacgatgatgcatagccgagttgagagactgatcggccacaatgggactgagacacggcccatactcctacgggaggcagcagtagggaatcttccacaatgggcgaaagcctgatggagcaacgccgcgtgtgtgatgaagggtttcggctcgtaaaacactgttgtaagagaagaatgacattgagagtaactgttcaatgtgtgacggtatcttaccagaaaggaacggctaaatacgtgccagcagccgcggtaatacgtatgttccaagcgttatccggatttattgggcgtaaagcgagcgcagacggttatttaagtctgaagtgaaagccctcagctcaactgaggaattgctttggaaactggatgacttgagtgcagtagaggaaagtggaactccatgtgtagcggtgaaatgcgtagatatatggaagaacaccagtggcgaaggcggctttctggactgtaactgacgttgaggctcgaaagtgtgggtagcaaacaggattagataccctggtagtccacaccgtaaacgatgagtgctaggtgtttgagggtttccgcccttaagtgccgcagctaacgcattaagcactccgcctggggagtacgaccgcaaggttgaaactcaaaggaattgacggggacccgcacaagcggtggagcatgtggtttaattcgaagcaacgcgaagaaccttaccaggtcttgacatcccttgacaactccagagatggagcgttcccttcggggacaaggtgacaggtggtgcatggttgtcrtcagctcgtgtcgtgagatgttgggttaagtcccgcaacragcgcaacccttattactagttgccagcattyagttgggcactctagtgagactgccggtgacaaaccggaggaaggtggggatgacgtcaaatcatcatgccccttatgacctgggctacacacgtgctacaatggcgtatacaacgagttgccaacccgcgagggtgagctaatctcttaaagtacgtctcagttcggattgtaggctgcaactcgcctacatgaagtcggaatcgctagtaatcgcggatcagcacgccgcggtgaatacgttcccgggtcttgtacacaccgcccgtcacaccatgagagtttgtaacacccaaagccggtggggtaaccttcgggagccagccgtctaaggtgggacagatgattagggtgaagtcgtaacaaggtagccgtaggagaacc

SEQ ID NO: 2008 - DNA, 992 bp, Weissella confusa
  modified_base (954)..(954): a, c, t, g, unknown or other
  modified_base (973)..(973): a, c, t, g, unknown or other
  modified_base (976)..(976): a, c, t, g, unknown or other
  modified_base (983)..(983): a, c, t, g, unknown or other
ggttcaactgatttgaagagcttgctcagatatgacgatggacattgcaaagagtggcgaacgggtgagtaacacgtgggaaacctacctcttagcaggggataacatttggaaacagatgctaataccgtataacaatgacaaccgcatggttgttatttaaaagatggttctgctatcactaagagatggtcccgcggtgcattagctagttggtaaggtaatggcttaccaaggcgatgatgcatagccgagttgagagactgatcggccacaatgggactgagacacggcccatactcctacgggaggcagcagtagggaatcttccacaatgggcgaaagcctgatggagcaacgccgcgtgtgtgatgaagggtttcggctcgtaaaacactgttgtaagagaagaatgacattgagagtaactgttcaatgtgtgacggtatcttaccagaaaggaacggctaaatacgtgccagcagccgcggtaatacgtatgttccaagcgttatccggatttattgggcgtaaagcgagcgcagacggttatttaagtctgaagtgaaagccctcagctcaactgaggaattgctttggaaactggatgacttgagtgcagtagaggaaagtggaactccatgtgtagcggtgaaatgcgtagatatatggaagaacaccagtggcgaaggcggctttctggactgtaactgacgttgaggctcgaaagtgtgggtagcaaacaggattagataccctggtagtccacaccgtaaacgatgagtgctaggtgtttgagggtttccgcccttaagtgccgcagctaacgcattaagcactccgcctggggagtacgaccgcaaggttgaaactcaaaggaattgacggggacccgcacaagcggtggagcatgtggtttaattcgaagcaacgcgaagaaccttaccaggtctngacatcccttgacactccnganatggagngttcccttc

SEQ ID NO: 2009 - DNA, 1496 bp, Weissella hellenica
gatgaacgctggcggcgtgcctaatacatgcaagtcgaacgctttgtgcttaattgatatgacgagcttgctctgatttgattttttgatttcaaagagtggcgaacgggtgagtaacacgtgggtaacctacctcttagcaggggataacatttggaaacaagtgctaataccgtataataccaacaaccgcatggttgttggttgaaagatggttctgctatcactaagagatggacccgcggtgcattagctagttggtaaggtaatggcttaccaaggcaatgatgcatagccgagttgagagactgatcggccacaatgggactgagacacggcccatactcctacgggaggcagcagtagggaatcttccacaatgggcgcaagcctgatggagcaacgccgcgtgtgtgatgaagggtttcggctcgtaaaacactgttataagagaagaacggcactgagagtaactgttcagtgtgtgacggtatcttaccagaaaggaacggctaaatacgtgccagcagccgcggtaatacgtatgttccaagcgttatccggatttattgggcgtaaagcgagcgcagacggttatttaagtctgaagtgaaagccctcagctcaactgaggaattgctttggaaactggatgacttgagtgcagtagaggaaagtggaactccatgtgtagcggtgaaatgcgtagatatatggaagaacaccagtggcgaaggcggctttctggactgtaactgacgttgaggctcgaaagtgtgggtagcaaacaggattagataccctggtagtccacaccgtaaacgatgagtgctagatgttcgagggtttccgcccttgagtgtcgcagctaacgcattaagcactccgcctggggagtacgaccgcaaggttgaaactcaaaggaattgacggggacccgcacaagcggtggagcatgtggtttaattcgaagcaacgcgaagaaccttaccaggtcttgacatcccttgacaacgctagaaatagcgcgttcccttcggggacaaggtgacaggtggtgcatggttgtcgtcagctcgtgtcgtgagatgttgggttaagtcccgcaacgagcgcaacccttattattagttgccagcattcagttgggcactctagtgagactgccggtgataaaccggaggaaggtggggatgacgtcaaatcatcatgccccttatgacctgggctacacacgtgctacaatggcatatacaacgagtcgctaacccgcgagggtacgctaatctcttaaagtatgtctcagttcggattgtaggctgcaactcgcctacatgaagtcggaatcgctagtaatcgcggatcagaacgccgcggtgaatacgttcccgggtcttgtacacaccgcccgtcacaccatgagagtttgtaacacccaaagccggtggggtaaccttttaggagccagccgtctaaggtgggacagatgattaggg

SEQ ID NO: 2010 - DNA, 1528 bp, Weissella kandleri
  modified_base (1)..(2): a, c, t, g, unknown or other
  modified_base (163)..(163): a, c, t, g, unknown or other
  modified_base (273)..(273): a, c, t, g, unknown or other
  modified_base (372)..(372): a, c, t, g, unknown or other
  modified_base (388)..(388): a, c, t, g, unknown or other
  modified_base (440)..(440): a, c, t, g, unknown or other
  modified_base (583)..(583): a, c, t, g, unknown or other
  modified_base (665)..(666): a, c, t, g, unknown or other
  modified_base (802)..(803): a, c, t, g, unknown or other
  modified_base (970)..(970): a, c, t, g, unknown or other
  modified_base (1005)..(1005): a, c, t, g, unknown or other
  modified_base (1060)..(1060): a, c, t, g, unknown or other
  modified_base (1090)..(1090): a, c, t, g, unknown or other
  modified_base (1137)..(1137): a, c, t, g, unknown or other
  modified_base (1425)..(1425): a, c, t, g, unknown or other
  modified_base (1524)..(1524): a, c, t, g, unknown or other
nntaaattgagagtttgatcctggctcaggatgaacgctggcggcgtgcctaatacatgcaagtcgaacgcactgtggttgaaatgagatgagaagcttgcttcaagtcaaatgccaacattgcagtgagtggcgaacgggtgagtaacacgtgggaaacctncctcttagcaggggataacatctggaaacaggtgctaataccgtataacaataaaaaccgcatggttttgatttaaaagatggttctgctatcactaagagatggtcccncggtgcattagttagttggtgaggtaaaggctcaccaagacgatgatgcatagccgagttgagagactgatcggccacaatgggactgagacacggccnatactcctacgggagncagcagtagggaatcttccacaatggacgaaagtctgatggagcaacgccgngtgtgtgatgaagggtttcggctcgtaaaacactgttgtaagagaagaatgacattgagagtaactgttcaatgtgtgacggtatcttaccagaaaggaacggctaaatacgtgccagcagccgcggtaatacgtatgttccnagcgttatccggatttattgggcgtaaagcgagcgcagacggttatttaagtctgaagtgaaagccctcggcttaaccgagnnattgctttggaaactggataacttgagtgcagtagaggaaagtggaactccatgtgtagcggtgaaatgcgtagatatatggaagaacaccagtggcgaaggcggctttctggactgtaactgacgttgaggctcnnaagtgtgggtagcaaacaggattagataccctggtagtccacaccgtaaacgatgagtgctagctgttcgagggtttccgcccttgagtggcgaagctaacgcattaagcactccgcctggggagtacgaccgcaaggttgaaactcaaaggaattgacggggaccngcacaagcggtggagcatgtggtttaattcgaagnaacgcgaagaaccttaccaggtcttgacatcctttgaccactccagagatggagntttcccttcggggtcaaagtgacaggtggngcatggttgtcgtcagctcgtgtcgtgagatgttgggttaagtcccncaacgagcgcaacccttattgttagttgccagcatttagttgggcactctagcaagactgccggtgacaaaccggaggaaggcggggatgacgtcaaatcatcatgccccttatgacctgggctacacacgtgctacaatggcaagtacaacgagcagccaacccgcgagggtgcgcaaatctcttaaagcttgtctcagttcggactgtaggctgcaactcgcctacacgaagtcggaatcgctagtaatcgcggatcagcacgccgcggtgaatacgttcccgggncttgtacacaccgcccgtcacaccatgagagtttgtaacacccaaagtcggtgaggtaacctttataggggccagccgcctaaggtgggacagatgatnaggg

SEQ ID NO: 2011 - DNA, 1591 bp, Weissella koreensis
tttaaattgagagtttgatcctggctcaggatgaacgctggcggcgtgcctaatacatgcaagtcgaacgcattgtggttgaaatgatatgaagaacttgttcagatttgattttcaacattgcaatgagtggcgaacgggtgagtaacacgtgggaaacctacctcttagcaggggataacatttggaaacaaatgctaataccgtataataattaaaaccgcatggttttagtttaaaagatggtcttgctatcactaagagatggtcccgcggtgtattagttagttggtgaggtaatggctcaccaagacaatgatacatagccgagttgagagactgaccggccacaatgggactgagacacggcccatactcctacgggaggcagcagtagggaatcttccacaatggacgaaagtctgatggagcaacgccgcgtgtgtgatgaagggtttcggctcgtaaaacactgttgtaagagaagaatgacattgagagtaactgttcaatgtgtgacggtatcttaccagaaaggaacggctaaatacgtgccagcagccgcggtaatacgtatgttccaagcgttatccggatttattgggcgtaaagcgagcgcagacggttatttaagtctgaagtgaaagccctcggctcaaccgaggaattgctttggaaactggataacttgagtgcagtagaggaaagtggaactccatgtgtagcggtgaaatgcgtagatatatggaagaacaccagtggcgaaggcggctttctggactgtaactgacgttgaggctcgaaagtgtgggtagcaaacaggattagataccctggtagtccacactgtaaacgatgagtgctagttgttcgagggtttccgcccttgagtgacgaagctaacgcattaagcactccgcctggggagtacgaccgcaaggttgaaactcaaaggaattgacggggacccgcacaagcggtggagcatgtggtttaattcgaagcaacgcgaagaaccttaccaggtcttgacatcctttgaccactccagagatggagctttcccttcggggacaaagtgacaggtggtgcatggttgtcgtcagctcgtgtcgtgagatgttgggttaagtcccgcaacgagcgcaacccttattgttagttgccagcatttagttgggcactctagcaagactgccggtgacaaaccggaggaaggcggggatgacgtcaaatcatcatgccccttatgacctgggctacacacgtgctacaatggcaagtacaacgagtcgccaacccgcgagggtgcgcaaatctcttaaagcttgtctcagttcggactgtaggctgcaactcgcctacacgaagtcggaatcgctagtaatcgcggatcagcacgccgcggtgaatacgttcccgggtcttgtacacaccgcccgtcacaccatgagagtttgtaacacccaaagtcggtgaggtaaccttttattaggagccagccgcctaaggtgggacagatgattagggtgaagtcgtaacaaggtagccgtaggagaacctgcggctggatcacctcctttctaaggaa

SEQ ID NO: 2012 - DNA, 1579 bp, Weissella paramesenteroides
tttaaaatgagagtttgatcctggctcaggatgaacgctggcggcgtgcctaatacatgcaagtcgaacgctttgtctttaactgatatgaagagcttgctctgatttgattttatctgacaaagagtggcgaacgggtgagtaacacgtgggtaacctacctcttagcaggggataacatttggaaacaagtgctaataccgtataataccaacaaccgcatggttgttggttgaaagatggttctgctatcactaagagatggacccgcggtgcattagctagttggtaaggtaacggcttaccaaggcaatgatgcatagccgagttgagagactgatcggccacaatgggactgagacacggcccatactcctacgggaggcagcagtagggaatcttccacaatgggcgcaagcctgatggagcaacgccgcgtgtgtgatgaagggtttcggctcgtaaaacactgttataagagaagaacggcactgagagtaactgttcagtgtgtgacggtatcttaccagaaaggaacggctaaatacgtgccagcagccgcggtaatacgtatgttccaagcgttatccggatttattgggcgtaaagcgagcgcagacggttatttaagtctgaagtgaaagccctcagctcaactgaggaatggctttggaaactggatgacttgagtgcagtagaggaaagtggaactccatgtgtagcggtgaaatgcgtagatatatggaagaacaccagtggcgaaggcggctttctggactgtaactgacgttgaggctcgaaagtgtgggtagcaaacaggattagataccctggtagtccacaccgtaaacgatgagtgctagatgttcgagggtttccgcccttgagtgtcgcagctaacgcattaagcactccgcctggggagtacgaccgcaaggttgaaactcaaaggaattgacggggacccgcacaagcggtggagcatgtggtttaattcgaagcaacgcgaagaaccttaccaggtcttgacatcccttgctaatcctagaaataggacgttcccttcggggacaaggtgacaggtggtgcatggttgtcgtcagctcgtgtcgtgagatgttgggttaagtcccgcaacgagcgcaacccttattattagttgccagcattcagttgggcactctagtgagactgccggtgacaaaccggaggaaggtggggatgacgtcaaatcatcatgccccttatgacctgggctacacacgtgctacaatggcatatacaacgagtcgccaacccgcgagggtgcgctaatctcttaaagtatgtctcagttcggattgtaggctgcaactcgcctacatgaagtcggaatcgctagtaatcgcggatcagcacgccgcggtgaatacgttcccgggtcttgtacacaccgcccgtcacaccatgagagtttgtaacacccaaagccggtggggtaaccttttaggagccagccgtctaaggtgggacagatgattagggtgaagtcgtaacaaggtagccgtaggagaacctgcggctggatcacctcctttct

SEQ ID NO: 2013 - DNA, 1234 bp, Weissella sp.
  KLDS 7.0701
agtggcgaacgggtgagtaacacgtgggaaacctacctcttagcaggggataacatttggaaacagatgctaataccgtataacaaaagtcactaagagatggtcccgcggtgcattagttagttggtgaggtaatggctcaccaagacgatgatgcatagccgagttgagagactgatcggccacaatgggactgagacacggcccatactcctacgggaggcagcagtagggaatcttccacaatgggcgaaagcctgatggagcaacgccgcgtgtgtgatgaagggtttcggctcgtaaaacactgttgtaagagaagatgacggtatcttaccagaaaggaacggctaaatacgtgccagcagccgcggtaatacgtatgttccaagcgttatccggatttattgggcgtaaagcgagcgcagacggttatttaagtctgaagtgaaagccctcagctcaactgaggaattgctttggaaactggatgacttgagtgcagtagaggaaagtggaactccatgtgtagcggtgaaatgcgtagatatatggaagaacaccagtggcgaaggcggctttctggactgactgacgttgaggctcgaaagtgtgggtagcaaacaggattagataccctggtagtccacaccgtaaacgatgagtgctaggtgtttgagcttaagtgccgcagctaacgcattaagcactccgcctggggagtacgaccgcaaggttgaaactcaaaggaattgacggggacccgcacaagcggtggagcatgtggtttaattcgaagcaacgcgaagaaccttaccaggtcttgacatcgacaggtggtgcatggttgtcgtcagctcgtgtcgtgagatgttgggttaagtcccgcaacgagcgcaacccttattactagttgccagcatgggcactctagtgagactgccggtgacaaaccggaggaaggtggggatgacgtcaaatcatcatgccccttatgacctgggctacacacgtgctacaatggcgtacaacgagttgccaacccgcgagggtgagctaatctctttacgtctcagttcggatgtaggctgcaactcgcctacagaagtcggaatcgctagtaatcgcggatcagcacgccgcggtgaatacgttcccgggtcttgtacacaccgcccgtcacaccatgagagtttgtaacacccaaagccggtgggtagccagccgtctaagg

SEQ ID NO: 2014 - DNA, 1480 bp, Wolinella succinogenes
agagtttgatcctggctcagagtgaacgctggcggcgtgcctaatacatgcaagtcgaacggtaacagggtgtagcttgctatactgctgacgagtggcgcacgggtgagtaatgcataggttatgtgccccatagtctggaatagccactggaaacggtgattaataccggatattcccgagaggggaaagtttttcgctatgggatcagcctatgtcctatcagcttgttggtgaggtaatggctcaccaaggctatgacgggtatccggcctgagagggtgatcggacacactggaactgagacacggtccagactcctacgggaggcagcagtagggaatattgctcaatgggcgaaagcctgaagcagcaacgccgcgtggaggatgaaggtcttcggattgtaaactccttttctaagagaagattatgacggtatcttaggaataagcaccggctaactccgtgccagcagccgcggtaatacggagggtgcaagcgttactcggaatcactgggcgtaaagagcacgtaggcggccttgcaagtcagatgtgaaatccaacggcttaaccgttgaactgcatttgaaactgcaaggctagagtatgggagaggtaggtggaattctcggtgtaggggtaaaatccgtagagatcgagaggaatactcattgcgaaggcgacctgctggaacattactgacgctgaggtgcgaaagcgtggggagcaaacaggattagataccctggtagtccacgccctaaacgatgaatgctagttgttgccctgcttgtcagggcagtaatgcagttaacacattaagcattccgcctggggagtacggtcgcaagattaaaactcaaaggaatagacggggacccgcacaagcggtggagcatgtggtttaattcgaagatacgcgaagaaccttacctgggcttgacattgatagaatcctatagagatatgggagtgccagtttactggagcttgaaaacaggtgctgcacggctgtcgtcagctcgtgtcgtgagatgttgggttaagtcccgcaacgagcgcaaccctcgtcactagttgctaacggttcggccgagcactctagtgagactgccttcgcaaggaggaggaaggtgaggacgacgtcaagtcatcatggcccttacgcccagggctacacacgtgctacaatggtgtgtacaaagagaagcaataccgcgaggtggagcaaatctttaaaacacatctcagttcggattgtagtctgcaactcgactacatgaagctggaatcgctagtaatcgtagatcagcaatgctacggtgaatacgttcccgggtcttgtactcaccgcccgtcacaccatgggagttgtattcgccttaagccgggacgctaaactggctaccgtccacggcggatgcagcgactggggtgaagtcgtaacaaggtaaccgtaggtgaacctgcggttg

SEQ ID NO: 2015 - DNA, 1491 bp, Xanthomonadaceae bacterium NML 03-0222
agtgaacgctggcggcaggcctaacacatgcaagtcgaacggcagcgcgagagagcttgctctcttggcggcgagtggcggacgggtgaggaatacgtcggaatctgcctatttgtgggggataacgtagggaaacttacgctaataccgcatacgtcctacgggagaaagcaggggaccttcgggccttgcgcagatagatgagccgacgtcggattagctagttgggggggtaatggcccaccaaggcaacgatccgtagctggtctgagaggatgatcagccacactggaactgagacacggtccagactcctacgggaggcagcagtggggaatattggacaatgggcgcaagcctgatccagccatgccgcgtgggtgaagaaggccttcgggttgtaaagcccttttgttgggaaagaaaagcatgcggttaatacccgtgtgtcatgacggtacccaaagaataagcaccggctaacttcgtgccagcagccgcggtaatacgaagggtgcaagcgttactcggaattactgggcgtaaagcgtgcgtaggtggtttgttaagtcagatgtgaaagccctgggctcaacctgggaactgcatttgatactggcaagctagagtgcggtagaggatagcggaattcctggtgtagcagtgaaatgcgtagagatcaggaggaacatccgtggcgaaggcggctatctgggccagcactgacactgaggcacgaaagcgtggggagcaaacaggattagataccctggtagtccacgccctaaacgatgcgaactggatgttgggctcaacttggagttcagtatcgaagctaacgcgttaagttcgccgcctggggagtacggtcgcaagactgaaactcaaaggaattgacgggggcccgcacaagcggtggagtatgtggtttaattcgaagcaacgcgcagaaccttacctggccttgacatgtcgagaacttggcagagatgccttggtgccttcgggaactcgaacacaggtgctgcatggctgtcgtcagctcgtgtcgtgagatgttgggttaagtcccgcaacgagcgcaacccttgtccttagttgccagcacgtaatggtgggaactctaaggagaccgccggtgacaaaccggaggaaggtggggatgacgtcaagtcatcatggcccttacggccagggctacacacgtactacaatgggaaggacagagggctgcgaacccgcgagggcaagccaatcccagaaaccttctctcagtccggattggagtctgcaactcgactccatgaagtcggaatcgctagtaatcgcagatcagcattgctgcggtgaatacgttcccgggccttgtacacaccgcccgtcacaccatgggagtttgttgcaccagaagcaggtagcttaaccttcgggagggcgcttgccacggtgtggccgatgactggggtgaagtcgtaacaaggtagccgtacc

SEQ ID NO: 2016 - DNA, 1548 bp, Xanthomonas campestris
agagtttggtcctggctcagagtgaacgctggcggcaggcctaacacatgcaagtcgaacggcagcacagtaagagcttgctcttacgggtggcgagtggcggacgggtgaggaatacatcggaatctactctttcgtgggggataacgtagggaaacttacgctaataccgcatacgacctacgggtgaaagcggaggaccttcgggcttcgcgcgattgaatgagccgatgtcggattagctagttggcggggtaaaggcccaccaaggcgacgatccgtagctggtctgagaggatgatcagccacactggaactgagacacggtccagactcctacgggaggcagcagtggggaatattggacaatgggcgcaagcctgatccatccatgccgcgtgggtgaagaaggccttcgggttgtaaagcccttttgttgggaaagaaaagcagtcggttatacccgattgttctgacggtacccaaagaataagcaccggctaacttcgcgccagcagccgcggtaatacgaagggtgcaagcgttactcggaattactgggcgtaaagcgtgcgtaggtggtggtttaagtctgttgtgaaagccctgggctcaacctgggaattgcagtggatactgggtcactagagtgtggtagagggtagcggaattcccggtgtagcagtgaaatgcgtagagatcgggaggaacatccgtggcgaaggcggctacctggaccaacactgacactgaggcgcgaaagcgtggggagcaaacaggattagataccctggtagtccacgccctaaacgatgcgaactggatgttgggtgcaatttggcacgcagtatcgaagctaacgcgttaagttcgccgcctggggagtacggtcgcaagactgaaactcaaaggaattgacgggggcccgcacaagcggtggagtatgtggtttaattcgatgcaacgcgaagaaccttacctggtcttgacatccacggaactttccagagatggattggttgccttcgggaaccgtgagacagtgctgcatggctgtcgtcagctcgtgtcgtgagatgttgggttaagtcccgcaagagcgcaacccttgtccttagttgccaagccaacgtaatggtgggaactctaaggagaccggccgtgacaaaccggaggaaggtggggatgacgtcaaagtcaatcatggccacttacgtccagggctacacacgtactacaatggtagggtacagagggctgcaaacaccgcgagggtaagccaatcccagaaaccctatctcagtccggattggagtctgcaactcgactccatgaagtcggaatcagctagtaatcgcagatcagcattgctgcggtgaatacgttcccgggccttgtacacacacagcaccgtcacacatgggagtttgttgcaccagaagcaggtagcttaaccttcgggagggcgcttgccacggtgtggccgatgactggggtgaagtcgtaacaaggtagccgtatcggaaggtgcggctggatcacctcctt

SEQ ID NO: 2017 - DNA, 1301 bp, Xanthomonas sp.
  kmd_489
gaatctaccgttttcgtgggggataacgtagggaaacttacgctaataccgcatacgaccttagggtgaaagcggaggaccttcgggcttcgcgcggatagatgagccgatgtcggattagctagttggcggggtaaaggcccaccaaggcgacgatccgtagctggtctgagaggatgatcagccacactggaactgagacacggtccagactcctacgggaggcagcagtggggaatattggacaatgggcgcaagcctgatccagccatgccgcgtgggtgaagaaggccttcgggttgtaaagcccttttgttgggaaagaaaagcagtcggttaatacccgattgttctgacggtacccaaagaataagcaccggctaacttcgtgccagcagccgcggtaatacgaagggtgcaagcgttactcggaattactgggcgtaaagcgtgcgtaggtggttgtttaagtccgttgtgaaagccctgggctcaacctgggaattgcagtggatactgggcaactagagtgtggtagaggatggcggaattcccggtgtagcagtgaaatgcgtagagatcgggaggaacatctgtggcgaaggcggccatctggaccaacactgacactgaggcacgaaagcgtggggagcaaacaggattagataccctggtagtccacgccctaaacgatgcgaactggatgttgggtgcaacttggcacgcagtatcgaagctaacgcgttaagttcgccgcctggggagtacggtcgcaagactgaaactcaaaggaattgacgggggcccgcacaagcggtggagtatgtggtttaattcgatgcaacgcgaagaaccttacctggtcttgacatccacggaactttccagagatggattggtgccttcgggaaccgtgagacaggtgctgcatggctgtcgtcagctcgtgtcgtgagatgttgggttaagtcccgcaacgagcgcaacccttgtccttagttgccagcacgtaatggtgggaactctaaggagaccgccggtgacaaaccggaggaaggtggggatgacgtcaagtcatcatggcccttacgaccagggctacacacgtactacaatggttaggacagagggctgcaaactcgcgagagtaagccaatcccagaaacctaatctcagtccggattggagtctgcaactcgactccatgaagtcggaatcgctagtaatcgcagatcagcattgvtgtcggwgaatacgttcccggggcgtttgtacacaccgcccgtcactccwtacaagtt

SEQ ID NO: 2018 - DNA, 1471 bp, Xenophilus aerolatus
cacatgcaagtcgaacggtaacaggtcttcggatgctgacgagtggcgaacgggtgagtaatacatcggaacgtgcccagtcgtgggggataactacgcgaaagcgtagctaataccgcatacgatctatggatgaaagcgggggatcgcaagacctcgcgcgattggagcggccgatggcagattaggtagttggtggggtaaaggctcaccaagccgacgatctgtagctggtctgagaggacgaccagccacactgggactgagacacggcccagactcctacgggaggcagcagtggggaattttggacaatgggcgcaagcctgatccagccatgccgcgtgcaggatgaaggccttcgggttgtaaactgcttttgtacggaacgaaaagtctctttctaataaagagggatcatgacggtaccgtaagaataagcaccggctaactacgtgccagcagccgcggtaatacgtagggtgcaagcgttaatcggaattactgggcgtaaagcgtgcgcaggcggtgatgtaagacagttgtgaaatccccgggctcaacctgggaactgcatctgtgactgcatcgctggagtgcggcagagggggatggaattccgcgtgtagcagtgaaatgcgtagatatgcggaggaacaccgatggcgaaggcaatcccctgggcctgcactgacgctcatgcacgaaagcgtggggagcaaacaggattagataccctggtagtccacgccctaaacgatgtcaactggttgttgggaattcactttctcagtaacgaagctaacgcgtgaagttgaccgcctggggagtacggccgcaaggttgaaactcaaaggaattgacggggacccgcacaagcggtggatgatgtggtttaattcgatgcaacgcgaaaaaccttacccacctttgacatgtacggaatttgccagagatggcttagtgctcgaaagagaaccgtaacacaggtgctgcatggctgtcgtcagctcgtgtcgtgagatgttgggttaagtcccgcaacgagcgcaacccttgtcattagttgctacattcagttgggcactctaatgagactgccggtgacaaaccggaggaaggtggggatgacgtcaagtcctcatggcccttataggtggggctacacacgtcatacaatggctggtacaaagggttgccaacccgcgagggggagctaatcccataaagccagtcgtagtccggatcgcagtctgcaactcgactgcgtgaagtcggaatcgctagtaatcgtggatcagaatgtcacggtgaatacgttcccgggtcttgtacacaccgcccgtcacaccatgggagcgggttctgccagaagtagttagcctaaccgcaaggagggcgattaccacggcagggttcgtgactggggtgaagtcgtaacaaggtagccgtatcggaaggtgcggctgga

SEQ ID NO: 2019 - DNA, 1504 bp, Yersinia aldovae
gagtttgatcttggctcagattgaacgctggcggcaggcctaacacatgcaagtcgagcggcagcgggaagtagtttactactttgccggcgagcggcggacgggtgagtaatgtctgggaaactgcctgatggagggggataactactggaaacggtagctaataccgcatgacctcgcaagagcaaagtgggggaccttcgggcctcacgccatcggatgtgcccagatgggattagctagtaggtggggtaatggctcacctaggcgacgatccctagctggtctgagaggatgaccagccacactggaactgagacacggtccagactcctacgggaggcagcagtggggaatattgcacaatgggcgcaagcctgatgcagccatgccgcgtgtgtgaagaaggccttcgggttgtaaagcactttcagcgaggaggaaggcaatcgtgttaatagcacggttgattgacgttactcgcagaagaagcaccggctaactccgtgccagcagccgcggtaatacggagggtgcaagcgttaatcggaattactgggcgtaaagcgcacgcaggcggtttgttaagtcagatgtgaaatccccgcgcttaacgtgggaactgcatttgaaactggcaagctagagtcttgtagaggggggtagaattccaggtgtagcggtgaaatgcgtagagatctggaggaataccggtggcgaaggcggccccctggacaaagactgacgctcaggtgcgaaagcgtggggagcaaacaggattagataccctggtagtccacgctgtaaacgatgtcgacttggaggttgtgcccttgaggcgtggcttccggagctaacgcgttaagtcgaccgcctggggagtacggccgcaaggttaaaactcaaatgaattgacgggggcccgcacaagcggtggagcatgtggtttaattcgatgcaacgcgaagaaccttacctactcttgacatccacagaacttagcagagatgcttcggtgccttcgggaactgtgagacaggtgctgcatggctgtcgtcagctcgtgttgtgaaatgttgggttaagtcccgcaacgagcgcaacccttatcctttgttgccagcacgtaatggtgggaactcaagggagactgccggtgacaaaccggaggaaggtggggatgacgtcaagtcatcatggcccttacgagtagggctacacacgtgctacaatggcagatacaaagtgaagcgaactcgcgagagccagcggaccacataaagtctgtcgtagtccggattggagtctgcaactcgactccatgaagtcggaatcgctagtaatcgtagatcagaatgctacggtgaatacgttcccgggccttgtacacaccgcccgtcacaccatgggagtgggttgcaaaagaagtaggtagcttaaccttcgggagggcgcttaccactttgtgattcatgactggggtgaagtcgtaacaaggtagccg

SEQ ID NO: 2020 - DNA, 1419 bp, Yersinia aleksiciae
cacatgcaagtcgagcggcagcggggagtagtttactactctgccggcgagcggcggacgggtgagtaatgtctggggatctgcctgatggagggggataactactggaaacggtagctaataccgcatgacctcgcaagagcaaagtgggggaccttcgggcctcacgccatcggatgaacccagatgggattagctagtaggtgaggtaatggctcacctaggcgacgatccctagctggtctgagaggatgaccagccacactggaactgagacacggtccagactcctacgggaggcagcagtggggaatattgcacaatgggcgcaagcctgatgcagccatgccgcgtgtgtgaagaaggccttcgggttgtaaagcactttcagcgaggaggaaggcagtcgtgttaatagcacgattgattgacgttactcgcagaagaagcaccggctaactccgtgccagcagccgcggtaatacggagggtgcaagcgttaatcggaattactgggcgtaaagcgcacgcaggcggtttgttaagtcagatgtgaaatccccgcgcttaacgtgggaactgcatttgaaactggcaagctagagtcttgtagaggggggtagaattccaggtgtagcggtgaaatgcgtagagatctggaggaataccggtggcgaaggcggccccctggacaaagactgacgctcaggtgcgaaagcgtggggagcaaacaggattagataccctggtagtccacgctgtaaacgatgtcgacttggaggttgtgcccttgaggcgtggcttccggagctaacgcgttaagtcgaccgcctggggagtacggccgcaaggttaaaactcaaatgaattgacgggggcccgcacaagcggtggagcatgtggtttaattcgatgcaacgcgaagaaccttacctactcttgacatccacggaatttagcagagatgcttaagtgccttcgggaaccgtgagacaggtgctgcatggctgtcgtcagctcgtgttgtgaaatgttgggttaagtcccgcaacgagcgcaacccttatcctttgttgccagcacgtaatggtgggaactcaagggagactgccggtgacaaaccggaggaaggtggggatgacgtcaagtcatcatggcccttacgagtagggctacacacgtgctacaatggcagatacaaagtgaagcgaactcgcgagagcaagcggaccacataaagtctgtcgtagtccggattggagtctgcaactcgactccatgaagtcggaatcgctagtaatcgtagatcagaatgctacggtgaatacgttcccgggccttgtacacaccgcccgtcacaccatgggagtgggttgcaaaagaagtaggtagcttaaccttcgggagggcgcttaccac

SEQ ID NO: 2021 - DNA, 1461 bp, Yersinia bercovieri
attgaacgctggcggcaggcctaacacatgcaagtcgagcggcagcgggaagtagtttactactttgccggcgagcggcggacgggtgagtaatgtctggggatctgcctgatggagggggataactactggaaacggtagctaataccgcatgacctcgtaagagcaaagtgggggaccttcgggcctcacgccatcggatgaacccagatgggattagctagtaggtggggtaatggctcacctaggcgacgatccctagctggtctgagaggatgaccagccacactggaactgagacacggtccagactcctacgggaggcagcagtggggaatattgcacaatgggcgcaagcctgatgcatccatgccgcgtgtgtgaagaaggccttcgggttgtaaagcactttcagcgaggaggaaggcagtcgtgttaatagcacgattgattgacgttactcgcagaagaagcaccggctaactccgtgccagcagccgcggtaatacggagggtgcaagcgttaatcggaattactgggcgtaaagcgcacgcaggcggtttgttaagtcagatgtgaaatccccgcgcttaacgtgggaactgcatttgaaactggcaagctagagtcttgtagaggggggtagaattccaggtgtagcggtgaaatgcgtagagatctggaggaataccggtggcgaaggcggccccctggacaaagactgacgctcaggtgcgaaagcgtggggagcaaacaggattagataccctggtagtccacgctgtaaacgatgtcgacttggaggttgtgcccttgaggcgtggcttccggagctaacgcgttaagtcgaccgcctggggagtacggccgcaaggttaaaactcaaatgaattgacgggggcccgcacaagcggtggagcatgtggtttaattcgatgcaacgcgaagaaccttacctactcttgacatccacagaacttagcagagatgcttcagtgccttcgggaactgtgagacaggtgctgcatggctgtcgtcagctcgtgttgtgaaatgttgggttaagtcccgcaacgagcgcaacccttatcctttgttgccagcacgtaatggtgggaactcaagggagactgccggtgacaaaccggaggaaggtggggatgacgtcaagtcatcatggcccttacgagtagggctacacacgtgctacaatggcagatacaaagtgaagcgaactcgcgagagcaagcggaccacataaagtctgtcgtagtccggattggagtctgcaactcgactccatgaagtcggaatcgctagtaatcgtagatcagaatgctacggtgaatacgttcccgggccttgtacacaccgcccgtcacaccatgggagtgggttgcaaaagaagtaggtagcttaaccttcgggagggcgcttaccactttgtgattcatgactgg

SEQ ID NO: 2022 - DNA, 1546 bp, Yersinia enterocolitica
ttaaattgaagagtttgatcatggctcagattgaacgctggcggcaggcctaacacatgcaagtcgagcggcagcgggaagtagtttactactttgccggcgagcggcggacgggtgagtaatgtctgggaaactgcctgatggagggggataactactggaaacggtagctaataccgcataacgtcttcggaccaaagtgggggaccttcgggcctcacgccatcggatgtgcccagatgggattagctagtaggtggggtaatggctcacctaggcgacgatccctagctggtctgagaggatgaccagccacactggaactgagacacggtccagactcctacgggaggcagcagtggggaatattgcacaatgggcgcaagcctgatgcagccatgccgcgtgtgtgaagaaggccttcgggttgtaaagcactttcagcgaggaggaaggcataaaggttaataacctttgtgattgacgttactcgcagaagaagcaccggctaactccgtgccagcagccgcggtaatacggagggtgcaagcgttaatcggaattactgggcgtaaagcgcacgcaggcggtttgttaagtcagatgtgaaatccccgcgcttaacgtgggaactgcatttgaaactggcaagctagagtcttgtagaggggggtagaattccaggtgtagcggtgaaatgcgtagagatctggaggaataccggtggcgaaggcggccccctggacaaagactgacgctcaggtgcgaaagcgtggggagcaaacaggattagataccctggtagtccacgctgtaaacgatgtcgacttggaggttgtgcccttgaggcgtggcttccggagctaacgcgttaagtcgaccgcctggggagtacggccgcaaggttaaaactcaaatgaattgacgggggcccgcacaagcggtggagcatgtggtttaattcgatgcaacgcgaagaaccttacctactcttgacatccacggaatttagcagagatgctttagtgccttcgggaaccgtgagacaggtgctgcatggctgtcgccagctcgtgttgtgaaatgttgggttaagtcccgcaacgagcgcaacccttatcctttgttgccagcacgtgatggtgggaactcaaaggagactgctggtgataaaccggaggaaggtggggatgacgtcaagtcatcatggcccttacgagtagggctacacacgtgctacaatggcagatacaaagtgaagcgaactcgcgagagcaagcggaccacataaagtctgtcgtagtccggattggagtctgcaactcgactccatgaagtcggaatcgctagtaatcgtagatcagaatgctacggtgaatacgttcccgggccttgtacacaccgcccgtcacaccatgggagtgggttgcaaaagaagtaggtagcttaaccttcgggagggcgcttaccactttgtgattcatgactggggtgaagtcgtaacaaggtaaccgtaggggaacctgcggttggatcacctccttac

SEQ ID NO: 2023 - DNA, 1461 bp, Yersinia frederiksenii
attgaacgctggcggcaggcctaacacatgcaagtcgagcggcagcggaaagtagtttactactttgccggcgagcggcggacgggtgagtaatgtctgggaaactgcctgatggagggggataactactggaaacggtagctaataccgcatgacctcgcaagagcaaagtgggggaccttcgggcctcacgccatcggatgtgcccagatgggattagctagtaggtggggtaatggctcacctaggcgacgatccctagctggtctgagaggatgaccagccacactggaactgagacacggtccagactcctacgggaggcagcagtggggaatattgcacaatgggcgcaagcctgatgcagccatgccgcgtgtgtgaagaaggccttcgggttgtaaagcactttcagcgaggaggaaggggttgagtttaatacgctcaatcattgacgttactcgcagaagaagcaccggctaactccgtgccagcagccgcggtaatacggagggtgcaagcgttaatcggaattactgggcgtaaagcgcacgcaggcggtttgttaagtcagatgtgaaatccccgcgcttaacgtgggaactgcatttgaaactggcaagctagagtcttgtagaggggggtagaattccaggtgtagcggtgaaatgcgtagagatctggaggaataccggtggcgaaggcggccccctggacaaagactgacgctcaggtgcgaaagcgtggggagcaaacaggattagataccctggtagtccacgctgtaaacgatgtcgacttggaggttgtgcccttgaggcgtggcttccggagctaacgcgttaagtcgaccgcctggggagtacggccgcaaggttaaaactcaaatgaattgacgggggcccgcacaagcggtggagcatgtggtttaattcgatgcaacgcgaagaaccttacctactcttgacatccacagaacttagcagagatgcttcggtgccttcgggaactgtgagacaggtgctgcatggctgtcgtcagctcgtgttgtgaaatgttgggttaagtcccgcaacgagcgcaacccttatcctttgttgccagcacgtaatggtgggaactcaaaggagactgccggtgacaaaccggaggaaggtggggatgacgtcaagtcatcatggcccttacgagtagggctacacacgtgctacaatggcagatacaaagtgaagcgaactcgcgagagcaagcggaccacataaagtctgtcgtagtccggattggagtctgcaactcgactccatgaagtcggaatcgctagtaatcgtagatcagaatgctacggtgaatacgttcccgggccttgtacacaccgcccgtcacaccatgggagtgggttgcaaaagaagtaggtagcttaaccttcgggagggcgcttaccactttgtgattcatgactgg

SEQ ID NO: 2024 - DNA, 1461 bp, Yersinia intermedia
attgaacgctggcggcaggcctaacacatgcaagtcgagcggcagcgggaagtagtttactactttgccggcgagcggcggacgggtgagtaatgtctgggaaactgcctgatggagggggataactactggaaacggtagctaataccgcatgacctcgtaagagcaaagtgggggaccttcgggcctcacgccatcggatgtgcccagatgggattagctagtaggtggggtaatggctcacctaggcgacgatccctagctggtctgagaggatgaccagccacactggaactgagacacggtccagactcctacgggaggcagcagtggggaatattgcacaatgggcgcaagcctgatgcagccatgccgcgtgtgtgaagaaggccttcgggttgtaaagcactttcagcgaggaggaaggcagtcgtgttaatagcacgattgattgacgttactcgcagaagaagcaccggctaactccgtgccagcagccgcggtaatacggagggtgcaagcgttaatcggaattactgggcgtaaagcgcacgcaggcggtttgttaagtcagatgtgaaatccccgcgcttaacgtgggaactgcatttgaaactggcaagctagagtcttgtagaggggggtagaattccaggtgtagcggtgaaatgcgtagagatctggaggaataccggtggcgaaggcggccccctggacaaagactgacgctcaggtgcgaaagcgtggggagcaaacaggattagataccctggtagtccacgctgtaaacgatgtcgacttggaggttgtgcccttgaggcgtggcttccggagctaacgcgttaagtcgaccgcctggggagtacggccgcaaggttaaaactcaaatgaattgacgggggcccgcacaagcggtggagcatgtggtttaattcgatgcaacgcgaagaaccttacctactcttgacatccacagaacttagcagagatgctttagtgccttcgggaaccgtgagacaggtgctgcatggctgtcgtcagctcgtgttgtgaaatgttgggttaagtcccgcaacgagcgcaacccttatcctttgttgccagcacgtaatggtgggaactcaagggagactgccggtgacaaaccggaggaaggtggggatgacgtcaagtcatcatggcccttacgagtagggctacacacgtgctacaatggcagatacaaagtgaagcgaactcgcgagagcaagcggaccacataaagtctgtcgtagtccggattggagtctgcaactcgactccatgaagtcggaatcgctagtaatcgtagatcagaatgctacggtgaatacgttcccgggccttgtacacaccgcccgtcacaccatgggagtgggttgcaaaagaagtaggtagcttaaccttcgggagggcgcttaccactttgtgattcatgactgg

SEQ ID NO: 2025 - DNA, 1543 bp, Yersinia kristensenii
aattgaagagtttgatcatggctcagattgaacgctggcggcaggcctaacacatgcaagtcgagcggcagcgggaagtagtttactactttgccggcgagcggcggacgggtgagtaatgtctgggaaactgcctgatggagggggataactactggaaacggtagctaataccgcatgacctcgcaagagcaaagtgggggaccttcgggcctcacgccatcggatgtgcccagatgggattagctagtaggtggggtaatggctcacctaggcgacgatccctagctggtctgagaggatgaccagccacactggaactgagacacggtccagactcctacgggaggcagcagtggggaatattgcacaatgggcgcaagcctgatgcagccatgccgcgtgtgtgaagaaggccttcgggttgtaaagcactttcagcgaggaggaagggttcagtgttaatagcactgagcattgacgttactcgcagaagaagcaccggctaactccgtgccagcagccgcggtaatacggagggtgcaagcgttaatcggaattactgggcgtaaagcgcacgcaggcggtttgttaagtcagatgtgaaatccccgcgcttaacgtgggaactgcatttgaaactggcaagctagagtcttgtagaggggggtagaattccaggtgtagcggtgaaatgcgtagagatctggaggaataccggtggcgaaggcggccccctggacaaagactgacgctcaggtgcgaaagcgtggggagcaaacaggattagataccctggtagtccacgctgtaaacgatgtcgacttggaggttgtgcccttgaggcgtggcttccggagctaacgcgttaagtcgaccgcctggggagtacggccgcaaggttaaaactcaaatgaattgacgggggcccgcacaagcggtggagcatgtggtttaattcgatgcaacgcgaagaaccttacctactcttgacatccacagaacttagcagagatgcttaggtgccttcgggaactgtgagacaggtgctgcatggctgtcgtcagctcgtgttgtgaaatgttgggttaagtcccgcaacgagcgcaacccttatcctttgttgccagcacgtaatggtgggaactcaagggagactgccggtgacaaaccggaggaaggtggggatgacgtcaagtcatcatggcccttacgagtagggctacacacgtgctacaatggcagatacaaagtgaagcgaactcgcgagagcaagcggaccacataaagtctgtcgtagtccggattggagtctgcaactcgactccatgaagtcggaatcgctagtaatcgtagatcagaatgctacggtgaatacgttcccgggccttgtacacaccgcccgtcacaccatgggagtgggttgcaaaagaagtaggtagcttaaccttcgggagggcgcttaccactttgtgattcatgactggggtgaagtcgtaacaaggtaaccgtaggggaacctgcggttggatcacctccttac

SEQ ID NO: 2026 - DNA, 1461 bp, Yersinia mollaretii
attgaacgctggcggcaggcctaacacatgcaagtcgagcggcagcggaaagtagcttgctactttgccggcgagcggcggacgggtgagtaatgtctgggaaactgcctgatggagggggataactactggaaacggtagctaataccgcatgacctcgcaagagcaaagtgggggaccttcgggcctcacgccatcggatgtgcccagatgggattagctagtaggtggggtaatggctcacctaggcgacgatccctagctggtctgagaggatgaccagccacactggaactgagacacggtccagactcctacgggaggcagcagtggggaatattgcacaatgggcgcaagcctgatgcatccatgccgcgtgtgtgaagaaggccttcgggttgtaaagcactttcagcgaggaggaaggcagtcgtgttaatagcacgattgattgacgttactcgcagaagaagcaccggctaactccgtgccagcagccgcggtaatacggagggtgcaagcgttaatcggaattactgggcgtaaagcgcacgcaggcggtttgttaagtcagatgtgaaatccccgcgcttaacgtgggaactgcatttgaaactggcaagctagagtcttgtagaggggggtagaattccaggtgtagcggtgaaatgcgtagagatctggaggaataccggtggcgaaggcggccccctggacaaagactgacgctcaggtgcgaaagcgtggggagcaaacaggattagataccctggtagtccacgctgtaaacgatgtcgacttggaggttgtgcccttgaggcgtggcttccggagctaacgcgttaagtcgaccgcctggggagtacggccgcaaggttaaaactcaaatgaattgacgggggcccgcacaagcggtggagcatgtggtttaattcgatgcaacgcgaagaaccttacctactcttgacatccacagaacttagcagagatgcttcggtgccttcgggaactgtgagacaggtgctgcatggctgtcgtcagctcgtgttgtgaaatgttgggttaagtcccgcaacgagcgcaacccttatcctttgttgccagcacgtaatggtgggaactcaagggagactgccggtgacaaaccggaggaaggtggggatgacgtcaagtcatcatggcccttacgagtagggctacacacgtgctacaatggcagatacaaagtgaagcgaactcgcgagagccagcggaccacataaagtctgtcgtagtccggattggagtctgcaactcgactccatgaagtcggaatcgctagtaatcgtagatcagaatgctacggtgaatacgttcccgggccttgtacacaccgcccgtcacaccatgggagtgggttgcaaaagaagtaggtagcttaaccttcgggagggcgcttaccactttgtgattcatgactgg

SEQ ID NO: 2027 - DNA, 1587 bp, Yersinia pestis
taaattgaagagtttgatcatggctcagattgaacgctggcggcaggcctaacacatgcaagtcgagcggcagcgggaagtagtttactactttgccggcgagcggcggacgggtgagtaatgtctggggatctgcctgatggagggggataactactggaaacggtagctaataccgcatgacctcgcaagagcaaagtgggggaccttagggcctcacgccatcggatgaacccagatgggattagctagtaggtggggtaatggctcacctaggcgacgatccctagctggtctgagaggatgaccagccacactggaactgagacacggtccagactcctacgggaggcagcagtggggaatattgcacaatgggcgcaagcctgatgcagccatgccgcgtgtgtgaagaaggccttcgggttgtaaagcactttcagcgaggaggaaggggttgagtttaatacgctcaatcattgacgttactcgcagaagaagcaccggctaactccgtgccagcagccgcggtaatacggagggtgcaagcgttaatcggaattactgggcgtaaagcgcacgcaggcggtttgttaagtcagatgtgaaatccccgcgcttaacgtgggaactgcatttgaaactggcaagctagagtcttgtagaggggggtagaattccaggtgtagcggtgaaatgcgtagagatctggaggaataccggtggcgaaggcggccccctggacaaagactgacgctcaggtgcgaaagcgtggggagcaaacaggattagataccctggtagtccacgctgtaaacgatgtcgacttggaggttgtgcccttgaggcgtggcttccggagctaacgcgttaagtcgaccgcctggggagtacggccgcaaggttaaaactcaaatgaattgacgggggcccgcacaagcggtggagcatgtggtttaattcgatgcaacgcgaagaaccttacctactcttgacatccacagaatttggcagagatgctaaagtgccttcgggaactgtgagacaggtgctgcatggctgtcgtcagctcgtgttgtgaaatgttgggttaagtcccgcaacgagcgcaacccttatcctttgttgccagcacgtaatggtgggaactcaagggagactgccggtgacaaaccggaggaaggtggggatgacgtcaagtcatcatggcccttacgagtagggctacacacgtgctacaatggcagatacaaagtgaagcgaactcgcgagagccagcggaccacataaagtctgtcgtagtccggattggagtctgcaactcgactccatgaagtcggaatcgctagtaatcgtagatcagaatgctacggtgaatacgttcccgggccttgtacacaccgcccgtcacaccatgggagtgggttgcaaaagaagtaggtagcttaaccttcgggagggcgcttaccactttgtgattcatgactggggtgaagtcgtaacaaggtaaccgtaggggaacctgcggttggatcacctccttacctaacgatacgcattgcgcagtgcccacacagattgtctgat

SEQ ID NO: 2028 - DNA, 1546 bp, Yersinia pseudotuberculosis
ttaaattgaagagtttgatcatggctcagattgaacgctggcggcaggcctaacacatgcaagtcgagcggcagcgggaagtagtttactactttgccggcgagcggcggacgggtgagtaatgtctggggatctgcctgatggagggggataactactggaaacggtagctaataccgcatgacctcgcaagagcaaagtgggggaccttagggcctcacgccatcggatgaacccagatgggattagctagtaggtggggtaatggctcacctaggcgacgatccctagctggtctgagaggatgaccagccacactggaactgagacacggtccagactcctacgggaggcagcagtggggaatattgcacaatgggcgcaagcctgatgcagccatgccgcgtgtgtgaagaaggccttcgggttgtaaagcactttcagcgaggaggaaggggttgagtttaatacgctcaatcattgacgttactcgcagaagaagcaccggctaactccgtgccagcagccgcggtaatacggagggtgcaagcgttaatcggaattactgggcgtaaagcgcacgcaggcggtttgttaagtcagatgtgaaatccccgcgcttaacgtgggaactgcatttgaaactggcaagctagagtcttgtagaggggggtagaattccaggtgtagcggtgaaatgcgtagagatctggaggaataccggtggcgaaggcggccccctggacaaagactgacgctcaggtgcgaaagcgtggggagcaaacaggattagataccctggtagtccacgctgtaaacgatgtcgacttggaggttgtgcccttgaggcgtggcttccggagctaacgcgttaagtcgaccgcctggggagtacggccgcaaggttaaaactcaaatgaattgacgggggcccgcacaagcggtggagcatgtggtttaattcgatgcaacgcgaagaaccttacctactcttgacatccacggaatttagcagagatgctttagtgccttcgggaaccgtgagacaggtgctgcatggctgtcgtcagctcgtgttgtgaaatgttgggttaagtcccgcaacgagcgcaacccttatcctttgttgccagcacgtaatggtgggaactcaagggagactgccggtgacaaaccggaggaaggtggggatgacgtcaagtcatcatggcccttacgagtagggctacacacgtgctacaatggcagatacaaagtgaagcgaactcgcgagagccagcggaccacataaagtctgtcgtagtccggattggagtctgcaactcgactccatgaagtcggaatcgctagtaatcgtagatcagaatgctacggtgaatacgttcccgggccttgtacacaccgcccgtcacaccatgggagtgggttgcaaaagaagtaggtagcttaaccttcgggagggcgcttaccactttgtgattcatgactggggtgaagtcgtaacaaggtaaccgtaggggaacctgcggttggatcacctccttac

SEQ ID NO: 2029 - DNA, 1531 bp, Yersinia rohdei
agagtttgatcatggctcagattgaacgctggcggcaggcctaacacatgcaagtcgagcggcagcgggaagtagtttactactttgccggcgagcggcggacgggtgagtaatgtctgggaaactgcctgatggagggggataactactggaaacggtagctaataccgcatgacctcgcaagagcaaagtgggggaccttcgggcctcacgccatcggatgtgcccagatgggattagctagtaggtggggtaatggctcacctaggcgacgatccctagctggtctgagaggatgaccagccacactggaactgagacacggtccagactcctacgggaggcagcagtggggaatattgcacaatgggcgcaagcctgatgcagccatgccgcgtgtgtgaagaaggccttcgggttgtaaagcactttcagcgaggaggaaggccaatagcttaatacgctgttggattgacgttactcgcagaagaagcaccggctaactccgtgccagcagccgcggtaatacggagggtgcaagcgttaatcggaattactgggcgtaaagcgcacgcaggcggtttgttaagtcagatgtgaaatccccgcgcttaacgtgggaactgcatttgaaactggcaagctagagtcttgtagaggggggtagaattccaggtgtagcggtgaaatgcgtagagatctggaggaataccggtggcgaaggcggccccctggacaaagactgacgctcaggtgcgaaagcgtggggagcaaacaggattagataccctggtagtccacgctgtaaacgatgtcgacttggaggttgtgcccttgaggcgtggcttccggagctaacgcgttaagtcgaccgcctggggagtacggccgcaaggttaaaactcaaatgaattgacgggggcccgcacaagcggtggagcatgtggtttaattcgatgcaacgcgaagaaccttacctactcttgacatccacagaacttagcagagatgcttcggtgccttcgggaactgtgagacaggtgctgcatggctgtcgtcagctcgtgttgtgaaatgttgggttaagtcccgcaacgagcgcaacccttatcctttgttgccagcacgtaatggtgggaactcaagggagactgccggtgacaaaccggaggaaggtggggatgacgtcaagtcatcatggcccttacgagtagggctacacacgtgctacaatggcagatacaaagtgaagcgaactcgcgagagcaagcggaccacataaagtctgtcgtagtccggattggagtctgcaactcgactccatgaagtcggaatcgctagtaatcgtagatcagaatgctacggtgaatacgttcccgggccttgtacacaccgcccgtcacaccatgggagtgggttgcaaaagaagtaggtagcttaaccttcgggagggcgcttaccactttgtgattcatgactggggtgaagtcgtaacaaggtaaccgtaggggaacctgcggttggatcacct

SEQ ID NO: 2030 - DNA, 1488 bp, Yokenella regensburgei
tagagtttgatccatggctcagattgaacgctggcggcaggcctaacacatgcaagtcgaacggtagcacagagagcttgctctcgggtgacgagtggcggacgggtgagtaatgtctgggaaactgcctgatggagggggataactactggaaacggtagctaataccgcataacgtcgcaagaccaaagagggggaccttcgggcctcttgccatcagatgtgcccagatgggattagctagtaggtggggtaacggctcacctaggcgacgatccctagctggtctgagaggatgaccagccacactggaactgagacacggtccagactcctacgggaggcagcagtggggaatattgcacaatgggcgcaagcctgatgcagccatgccgcgtgtatgaagaaggccttcgggttgtaaagtactttcagcgaggaggaaggcgatacggttaataaccgtgtcgattgacgttactcgcagaagaagcaccggctaactccgtgccagcagccgcggtaatacggagggtgcaagcgttaatcggaattactgggcgtaaagcgcacgcaggcggtctgtcaagtcttatgtgaaatccccgggctcaacctgggaactgcattcgaaactggcaggcttgagtcttgtagaggggggtagaattccaggtgtagcggtgaaatgcgtagagatctggaggaataccggtggcgaaggcggccccctggacaaagactgacgctcaggtgcgaaagcgtggggagcaaacaggattagataccctggtagtccacgccgtaaacgatgtcgacttggaggttgtgcccttgaggcgtggcttccggagctaacgcgttaagtcgaccgcctggggagtacggccgcaaggttaaaactcaaatgaattgacgggggcccgcacaagcggtggagcatgtggtttaattcgatgcaacgcgaagaaccttacctactcttgacatccacggaacttagcagagatgctttggtgccttcgggaaccgtgagacaggtgctgcatggctgtcgtcagctcgtgttgtgaaatgttgggttaagtcccgcaacgagcgcaacccttatcctttgttgccagcggttcggccgggaactcaaaggagactgccagtgataaactggaggaaggtggggatgacgtcaagtcatcatggcccttacgagtagggctacacacgtgctacaatggcatatacaaagagaagcgacctcgcgagagcaagcggacctcataaagtatgtcgtagtccggattggagtctgcaactcgactccatgaagtcggaatcgctagtaatcgtggatcagaatgccacggtgaatacgttcccgggccttgtacacaccgcccgtcacaccatgggagtgggttgcaaaagaagtaggtagcttaaccttcgggagggcgcttaccactttgtgattcatgactggggtgaagt

SEQ ID NO: 2031 - DNA, 1485 bp, Zimmermannella bifida
agagtttgatcctggctcaggacgaacgctggcggcgtgcttaacacatgcaagtcgaacgatgaagccttagcttgctttggtggattagtggcgaacgggtgagtaacacgtgagcaacgtgcccagaactctggaataaccgccggaaacggtggctaatactggataggtgccaaggccgcatggtctttggttggaaagatttttcggttctggatcggctcgcggcctatcagcttgttggtggggtaatggcctaccaaggcgacgacgggtagccggcctgagagggtgaccggccacactgggactgagacacggcccagactcctacgggaggcagcagtggggaatattgcacaatgggcgcaagcctgatgcagcaacgccgcgtgagggatgacggccttcgggttgtaaacctcttttagtagggaagaagcgaaagtgacggtacctgcagaaaaagcaccggctaactacgtgccagcagccgcggtaatacgtagggtgcaagcgttgtccggaattattgggcgtaaagagctcgtaggcggtttgtcgcgtctgctgtgaaattccgaggctcaacctcgggcgtgcagtgggtacgggcagacttgagtgcggtaggggagattggaattcctggtgtagcggtggaatgcgcagatatcaggaggaacaccgatggcgaaggcagatctctgggccgttactgacgctgaggagcgaaagcatggggagcgaacaggattagataccctggtagtccatgccgtaaacgttgggcgctagatgtggggaccattccacggtttctgtgtcgtagctaacgcattaagcgccccgcctggggagtacggccgcaaggctaaaactcaaaggaattgacgggggcccgcacaagcggcgtagcatgcggattaattcgatgcaacgcgaagaaccttaccaaggcttgacatataccggaaacggccagagatggtcgcccccttttgggtcggtatacaggtggtgcatggttgtcgtcagctcgtgtcgtgagatgttcggttaagtccggcaacgagcgcaaccctcgtcctatgttgccagcacgttatggtgggaactcatgggatactgccgtggtcaacacggaggaaggtggggatgacgtcaaatcatcatgccccttatgtcttgggcttcacgtatgctacaatggccggtacaatgggctgcgataccgcgaggtggagcgaatcccaaaaagccggtctcagttcggattggggtccgcaactcgaccccatgaagtcggagtcgctagtaatcgcagatcagcaacgctgcggtgaatacgttcccgggccttgtacacaccgcccgtcaagtcatgaaagtcggtaacacccgaagccggtggcctaaccttttggggggagccgtcgaaggtgggatcggtgattaggactaagtcgtaacaaggtagcc

SEQ ID NO: 2032 - DNA, 1482 bp, Zymomonas mobilis
agagtttgattctggctcagaacgaacgctggcggcatgcttaacacatgcaagtcgaacgaaggcttcggccttagtggcgcacgggtgcgtaacgcgtgggaatctgccttcaggtacggaataactaggggaaactcgagctaataccgtatgatatcgagagatcaaagatttatcgcctgaagatgagcccgcgttggattagctagttggtagggtaaaggcttaccaaggcgacgatccatagctggtctgagaggatgatcagccacactgggactgagacacggcccagactcctacgggaggcagcagtggggaatattggacaatgggggaaaccctgatccagcaatgccgcgtgagtgaagaaggccttagggttgtaaagctcttttacccgggatgataatgacagtaccgggagaataagctccggctaactccgtgccagcagccgcggtaatacggagggagctagcgttgttcggaattactgggcgtaaagcgtacgtaggcggtttaataagtcaggggtgaaagcccagagctcaactctggaactgcctttgagactgttagactagaacatagaagaggtaagtggaattccgagtgtagaggtgaaattcgtagatattcggaagaacaccagtggcgaaggcgacttactggtctatagttgacgctgaggtacgaaagcgtgggtagcaaacaggattagataccctggtagtccacgccgtaaacgatgataactagctgtccgggtacatggtatctgggtggcggagctaacgcattaagttatccgcctggggagtacggtcgcaagattaaaactcaaagaaattgacgggggcctgcacaagcggtggagcatgtggtttaattcgaagcaacgcgcagaaccttaccagcgtttgacatcctgatcgcggaaagtggagacacattctttcagttcggctggatcagagacaggtgctgcatggctgtcgtcagctcgtgtcgtgagatgttgggttaagtcccgcaacgagcgcaaccctcacctctagttgccatcattaagttgggcactttagaggaactgccggtgataagccggaggaaggtggggatgacgtcaagtcctcatggcccttacgcgctgggctacacacgtgctacaatggcggtgacagagggccgcaagcctgcaaaggttagctaatctcaaaaagccgtctcagttcggattgttctctgcaactcgagagcatgaaggcggaatcgctagtaatcgcggatcagcatgccgcggtgaatacgttcccaggccttgtacacaccgcccgtcacaccatgggagttggattcacccgaaggcgctgcgctaacccgcaagggaggcaggcgaccacggtgggtttagcgactggggtgaagtcgtaacaaggtagccgtaggggaacctgcggctggatcacctccttt

SEQ ID NO: 2033 - DNA, 20 bp, Artificial Sequence
  Description of Artificial Sequence: Synthetic primer
agrgtttgatcmtggctcag

SEQ ID NO: 2034 - DNA, 22 bp, Artificial Sequence
  Description of Artificial Sequence: Synthetic primer
tacggytaccttgttaygactt

SEQ ID NO: 2035 - DNA, 60 bp, Artificial Sequence
  Description of Artificial Sequence: Synthetic oligonucleotide
aatgatacggcgaccaccgagatctacactatggtaattgtgtgccagcmgccgcggtaa

SEQ ID NO: 2036 - DNA, 24 bp, Artificial Sequence
  Description of Artificial Sequence: Synthetic primer
caagcagaagacggcatacgagat

SEQ ID NO: 2037 - DNA, 32 bp, Artificial Sequence
  Description of Artificial Sequence: Synthetic primer
agtcagtcagccggactachvgggtwtctaat

SEQ ID NO: 2038 - DNA, 20 bp, Artificial Sequence
  Description of Artificial Sequence: Synthetic primer
tcctccgcttattgatatgc

SEQ ID NO: 2039 - DNA, 22 bp, Artificial Sequence
  Description of Artificial Sequence: Synthetic primer
ggaagtaaaagtcgtaacaagg

SEQ ID NO: 2040 - DNA, 19 bp, Artificial Sequence
  Description of Artificial Sequence: Synthetic primer
gtagtcatatgcttgtctc

SEQ ID NO: 2041 - DNA, 20 bp, Artificial Sequence
  Description of Artificial Sequence: Synthetic primer
cttccgtcaattcctttaag

SEQ ID NO: 2042 - DNA, 31 bp, Artificial Sequence
  Description of Artificial Sequence: Synthetic primer
tatggtaattgtgtgccagcmgccgcggtaa

SEQ ID NO: 2043 - DNA, 32 bp, Artificial Sequence
  Description of Artificial Sequence: Synthetic primer
attagawacccbdgtagtccggctgactgact

SEQ ID NO: 2044 - protein, 6 aa, Artificial Sequence
  Description of Artificial Sequence: Synthetic 6xHis tag
HHHHHH

SEQ ID NO: 2045 - DNA, 32 bp, Artificial Sequence
  Description of Artificial Sequence: Synthetic primer
agcagttgaatatagtggtttagttagagttg

SEQ ID NO: 2046 - DNA, 26 bp, Artificial Sequence
  Description of Artificial Sequence: Synthetic primer
catgcttttttagtttctggattgaa

SEQ ID NO: 2047 - DNA, 30 bp, Artificial Sequence
  Description of Artificial Sequence: Synthetic probe
  5' 6FAM
  3' MGB
catccagtctcaattgtatatgtttctcca

SEQ ID NO: 2048 - DNA, 1541 bp, Escherichia coli
aaattgaagagtttgatcatggctcagattgaacgctggcggcaggcctaacacatgcaagtcgaacggtaacaggaagaagcttgctctttgctgacgagtggcggacgggtgagtaatgtctgggaaactgcctgatggagggggataactactggaaacggtagctaataccgcataacgtcgcaagaccaaagagggggaccttcgggcctcttgccatcggatgtgcccagatgggattagctagtaggtggggtaacggctcacctaggcgacgatccctagctggtctgagaggatgaccagccacactggaactgagacacggtccagactcctacgggaggcagcagtggggaatattgcacaatgggcgcaagcctgatgcagccatgccgcgtgtatgaagaaggccttcgggttgtaaagtactttcagcggggaggaagggagtaaagttaatacctttgctcattgacgttacccgcagaagaagcaccggctaactcgtgcccaggcatgcgcaggaatacggaggtgcaagcgttaatcggaattactgggcgtaaagcgcacgcaggcggtttgttaagtcagatgtgaaatccccgggctcaacctgggaactgcatctgatactggcaagcttgagtctcgtagaggggggtagaattccaggtgtagcggtgaaatgcgtagagatctggaggaataccggtggcgaaggcggccccctggacgaagactcacgctcaggtgcgaaagcgtggggagcaaacaggattagataccctggtagtccacgccgtaaacgatgtcgacttggaggttgtgcccttgaggcgtggcttccggagctaacgcgttaagtcgaccgcctggggagtacggccgcaaggttaaaactcaaatgaattgacgggggcccgcacaagcggtggagcatgtggtttaattcgatgcaacgcgaagaaccttacctggtcttgacatccacggaagttttcagagatgagaatgtgccttcgggaaccgtgagacaggtgctgcatggctgtcgtcagctcgtgttgtgaaatgttgggttaagtcccgcaacgagcgcaacccttatcctttgttgccagcggtccggccgggaactcaaaggagactgccagtgataaactggaggaaggtggggatgacgtcaagtcatcatggcccttacgaccagggctacacacgtgctacaatggcgcatacaaagagaagcgacctcgcgagagcaagcggacctcataaagtgcgtcgtagtccggattggagtctgcaactcgactccatgaagtcggaatcgctagtaatcgtggatcagaatgccacggtgaatacgttcccgggccttgtacacaccgcccgmcacaccatgggagtgggttgcaaaagaagtaggtagcttaaccttcgggagggcgcttaccactttgtgattcatgactggggtgaagtcgtaacaaggtaaccgtaggggaacctgcggttggatcacctcctta
